United States Patent Application Publication US 2026/0258423 A1 - sequence listing, part 7

SEQ ID NO: 167803 - DNA, 46709983 bp, Homo sapiens (residues 1-1,668,214 of 46,709,983)
  source 1..46709983: mol_type = genomic DNA
nnnnnnnnnnnnnnnnnnnnnnnnnnnnnnnnnnnnnnnnnnnnnnnnnnnnnnnnnnnnnnnnnnnnnnnnnnnnnnnnnnnnnnnnnnnnnnnnnnnnnnnnnnnnnnnnnnnnnnnnnnnnnnnnnnnnnnnnnnnnnnnnnnnnnnnnnnnnnnnnnnnnnnnnnnnnnnnnnnnnnnnnnnnnnnnnnnnnnnnnnnnnnnnnnnnnnnnnnnnnnnnnnnnnnnnnnnnnnnnnnnnnnnnnnnnnnnnnnnnnnnnnnnnnnnnnnnnnnnnnnnnnnnnnnnnnnnnnnnnnnnnnnnnnnnnnnnnnnnnnnnnnnnnnnnnnnnnnnnnnnnnnnnnnnnnnnnnnnnnnnnnnnnnnnnnnnnnnnnnnnnnnnnnnnnnnnnnnnnnnnnnnnnnnnnnnnnnnnnnnnnnnnnnnnnnnnnnnnnnnnnnnnnnnnnnnnnnnnnnnnnnnnnnnnnnnnnnnnnnnnnnnnnnnnnnnnnnnnnnnnnnnnnnnnnnnnnnnnnnnnnnnnnnnnnnnnnnnnnnnnnnnnnnnnnnnnnnnnnnnnnnnnnnnnnnnnnnnnnnnnnnnnnnnnnnnnnnnnnnnnnnnnnnnnnnnnnnnnnnnnnnnnnnnnnnnnnnnnnnnnnnnnnnnnnnnnnnnnnnnnnnnnnnnnnnnnnnnnnnnnnnnnnnnnnnnnnnnnnnnnnnnnnnnnnnnnnnnnnnnnnnnnnnnnnnnnnnnnnnnnnnnnnnnnnnnnnnnnnnnnnnnnnnnnnnnnnnnnnnnnnnnnnnnnnnnnnnnnnnnnnnnnnnnnnnnnnnnnnnnnnnnnnnnnnnnnnnnnnnnnnnnnnnnnnnnnnnnnnnnnnnnnnnnnnnnnnnnnnnnnnnnnnnnnnnnnnnnnnnnnnnnnnnnnnnnnnnnnnnnnnnnnnnnnnnnnnnnnnnnnnnnnnnnnnnnnnnnnnnnnnnnnnnnnnnnnnnnnnnnnnnnnnnnnnnnnnnnnnnnnnnnnnnnnnnnnnnnnnnnnnnnnnnnnnnnnnnnnnnnnnnnnnnnnnnnnnnnnnnnnnnnnnnnnnnnnnnnnnnnnnnnnnnnnnnnnnnnnnnnnnnnnnnnnnnnnnnnnnnnnnnnnnnnnnnnnnnnnnnnnnnnnnnnnnnnnnnnnnnnnnnnnnnnnnnnnnnnnnnnnnnnnnnnnnnnnnnnnnnnnnnnnnnnnnnnnnnnnnnnnnnnnnnnnnnnnnnnnnnnnnnnnnnnnnnnnnnnnnnnnnnnnnnnnnnnnnnnnnnnnnnnnnnnnnnnnnnnnnnnnnnnnnnnnnnnnnnnnnnnnnnnnnnnnnnnnnnnnnnnnnnnnnnnnnnnnnnnnnnnnnnnnnnnnnnnnnnnnnnnnnnnnnnnnnnnnnnnnnnnnnnnnnnnnnnnnnnnnnnnnnnnnnnnnnnnnnnnnnnnnnnnnnnnnnnnnnnnnnnnnnnnnnnnnnnnnnnnnnnnnnnnnnnnnnnnnnnnnnnnnnnnnnnnnnnnnnnnnnnnnnnnnnnnnnnnnnnnnnnnnnnnnnnnnnnnnnnnnnnnnnnnnnnnnnnnnnnnnnnnnnnnnnnnnnnnnnnnnnnnnnnnnnnnnnnnnnnnnnnnnnnnnnnnnnnnnnnnnnnnnnnnnnnnnnnnnnnnnnnnnnnnnnnnnnnnnnnnnnnnnnnnnnnnnnnnnnnnnnnnnnnnnnnnnnnnnnnnnnnnnnnnnnnnnnnnnnnnnnnnnnnnnnnnnnnnnnnnnnnnnnnnnnnnnnnnnnnnnnnnnnnnnnnnnnnnnnnnnnnnnnnnnnnnnnnnnnnnnnnnnnnnnnnnnnnnnnnnnnnnnnnnnnnnnnnnnnnnnnnnnnnnnnnnnnnnnnnnnnnnnnnnnnnnnnnnnnnnnnnnnnnnnnnnnnnnnnnnnnnnnnnnnnnnnnnnnnnnnnnnnnnnnnnnnnnnnnnnnnnnnnnnnnnnnnnnnnnnnnnnnnnnnnnnnnnnnnnnnnnnnnnnnnnnnnnnnnnnnnnnnnnnnnnnnnnnnnnnnnnnnnnnnnnnnnnnnnnnnnnnnnnnnnnnnnnnnnnnnnnnnnnnnnnnnnnnnnnnnnnnnnnnnnnnnnnnnnnnnnnnnnnnnnnnnnnnnnnnnnnnnnnnnnnnnnnnnnnnnnnnnnnnnnnnnnnnnnnnnnnnnnnnnnnnnnnnnnnnnnnnnnnnnnnnnnnnnnnnnnnnnnnnnnnnnnnnnnnnnnnnnnnnnnnnnnnnnnnnnnnnnnnnnnnnnnnnnnnnnnnnnnnnnnnnnnnnnnnnnnnnnnnnnnnnnnnnnnnnnnnnnnnnnnnnnnnnnnnnnnnnnnnnnnnnnnnnnnnnnnnnnnnnnnnnnnnnnnnnnnnnnnnnnnnnnnnnnnnnnnnnnnnnnnnnnnnnnnnnnnnnnnnnnnnnnnnnnnnnnnnnnnnnnnnnnnnnnnnnnnnnnnnnnnnnnnnnnnnnnnnnnnnnnnnnnnnnnnnnnnnnnnnnnnnnnnnnnnnnnnnnnnnnnnnnnnnnnnnnnnnnnnnnnnnnnnnnnnnnnnnnnnnnnnnnnnnnnnnnnnnnnnnnnnnnnnnnnnnnnnnnnnnnnnnnnnnnnnnnnnnnnnnnnnnnnnnnnnnnnnnnnnnnnnnnnnnnnnnnnnnnnnnnnnnnnnnnnnnnnnnnnnnnnnnnnnnnnnnnnnnnnnnnnnnnnnnnnnnnnnnnnnnnnnnnnnnnnnnnnnnnnnnnnnnnnnnnnnnnnnnnnnnnnnnnnnnnnnnnnnnnnnnnnnnnnnnnnnnnnnnnnnnnnnnnnnnnnnnnnnnnnnnnnnnnnnnnnnnnnnnnnnnnnnnnnnnnnnnnnnnnnnnnnnnnnnnnnnnnnnnnnnnnnnnnnnnnnnnnnnnnnnnnnnnnnnnnnnnnnnnnnnnnnnnnnnnnnnnnnnnnnnnnnnnnnnnnnnnnnnnnnnnnnnnnnnnnnnnnnnnnnnnnnnnnnnnnnnnnnnnnnnnnnnnnnnnnnnnnnnnnnnnnnnnnnnnnnnnnnnnnnnnnnnnnnnnnnnnnnnnnnnnnnnnnnnnnnnnnnnnnnnnnnnnnnnnnnnnnnnnnnnnnnnnnnnnnnnnnnnnnnnnnnnnnnnnnnnnnnnnnnnnnnnnnnnnnnnnnnnnnnnnnnnnnnnnnnnnnnnnnnnnnnnnnnnnnnnnnnnnnnnnnnnnnnnnnnnnnnnnnnnnnnnnnnnnnnnnnnnnnnnnnnnnnnnnnnnnnnnnnnnnnnnnnnnnnnnnnnnnnnnnnnnnnnnnnnnnnnnnnnnnnnnnnnnnnnnnnnnnnnnnnnnnnnnnnnnnnnnnnnnnnnnnnnnnnnnnnnnnnnnnnnnnnnnnnnnnnnnnnnnnnnnnnnnnnnnnnnnnnnnnnnnnnnnnnnnnnnnnnnnnnnnnnnnnnnnnnnnnnnnnnnnnnnnnnnnnnnnnnnnnnnnnnnnnnnnnnnnnnnnnnnnnnnnnnnnnnnnnnnnnnnnnnnnnnnnnnnnnnnnnnnnnnnnnnnnnnnnnnnnnnnnnnnnnnnnnnnnnnnnnnnnnnnnnnnnnnnnnnnnnnnnnnnnnnnnnnnnnnnnnnnnnnnnnnnnnnnnnnnnnnnnnnnnnnnnnnnnnnnnnnnnnnnnnnnnnnnnnnnnnnnnnnnnnnnnnnnnnnnnnnnnnnnnnnnnnnnnnnnnnnnnnnnnnnnnnnnnnnnnnnnnnnnnnnnnnnnnnnnnnnnnnnnnnnnnnnnnnnnnnnnnnnnnnnnnnnnnnnnnnnnnnnnnnnnnnnnnnnnnnnnnnnnnnnnnnnnnnnnnnnnnnnnnnnnnnnnnnnnnnnnnnnnnnnnnnnnnnnnnnnnnnnnnnnnnnnnnnnnnnnnnnnnnnnnnnnnnnnnnnnnnnnnnnnnnnnnnnnnnnnnnnnnnnnnnnnnnnnnnnnnnnnnnnnnnnnnnnnnnnnnnnnnnnnnnnnnnnnnnnnnnnnnnnnnnnnnnnnnnnnnnnnnnnnnnnnnnnnnnnnnnnnnnnnnnnnnnnnnnnnnnnnnnnnnnnnnnnnnnnnnnnnnnnnnnnnnnnnnnnnnnnnnnnnnnnnnnnnnnnnnnnnnnnnnnnnnnnnnnnnnnnnnnnnnnnnnnnnnnnnnnnnnnnnnnnnnnnnnnnnnnnnnnnnnnnnnnnnnnnnnnnnnnnnnnnnnnnnnnnnnnnnnnnnnnnnnnnnnnnnnnnnnnnnnnnnnnnnnnnnnnnnnnnnnnnnnnnnnnnnnnnnnnnnnnnnnnnnnnnnnnnnnnnnnnnnnnnnnnnnnnnnnnnnnnnnnnnnnnnnnnnnnnnnnnnnnnnnnnnnnnnnnnnnnnnnnnnnnnnnnnnnnnnnnnnnnnnnnnnnnnnnnnnnnnnnnnnnnnnnnnnnnnnnnnnnnnnnnnnnnnnnnnnnnnnnnnnnnnnnnnnnnnnnnnnnnnnnnnnnnnnnnnnnnnnnnnnnnnnnnnnnnnnnnnnnnnnnnnnnnnnnnnnnnnnnnnnnnnnnnnnnnnnnnnnnnnnnnnnnnnnnnnnnnnnnnnnnnnnnnnnnnnnnnnnnnnnnnnnnnnnnnnnnnnnnnnnnnnnnnnnnnnnnnnnnnnnnnnnnnnnnnnnnnnnnnnnnnnnnnnnnnnnnnnnnnnnnnnnnnnnnnnnnnnnnnnnnnnnnnnnnnnnnnnnnnnnnnnnnnnnnnnnnnnnnnnnnnnnnnnnnnnnnnnnnnnnnnnnnnnnnnnnnnnnnnnnnnnnnnnnnnnnnnnnnnnnnnnnnnnnnnnnnnnnnnnnnnnnnnnnnnnnnnnnnnnnnnnnnnnnnnnnnnnnnnnnnnnnnnnnnnnnnnnnnnnnnnnnnnnnnnnnnnnnnnnnnnnnnnnnnnnnnnnnnnnnnnnnnnnnnnnnnnnnnnnnnnnnnnnnnnnnnnnnnnnnnnnnnnnnnnnnnnnnnnnnnnnnnnnnnnnnnnnnnnnnnnnnnnnnnnnnnnnnnnnnnnnnnnnnnnnnnnnnnnnnnnnnnnnnnnnnnnnnnnnnnnnnnnnnnnnnnnnnnnnnnnnnnnnnnnnnnnnnnnnnnnnnnnnnnnnnnnnnnnnnnnnnnnnnnnnnnnnnnnnnnnnnnnnnnnnnnnnnnnnnnnnnnnnnnnnnnnnnnnnnnnnnnnnnnnnnnnnnnnnnnnnnnnnnnnnnnnnnnnnnnnnnnnnnnnnnnnnnnnnnnnnnnnnnnnnnnnnnnnnnnnnnnnnnnnnnnnnnnnnnnnnnnnnnnnnnnnnnnnnnnnnnnnnnnnnnnnnnnnnnnnnnnnnnnnnnnnnnnnnnnnnnnnnnnnnnnnnnnnnnnnnnnnnnnnnnnnnnnnnnnnnnnnnnnnnnnnnnnnnnnnnnnnnnnnnnnnnnnnnnnnnnnnnnnnnnnnnnnnnnnnnnnnnnnnnnnnnnnnnnnnnnnnnnnnnnnnnnnnnnnnnnnnnnnnnnnnnnnnnnnnnnnnnnnnnnnnnnnnnnnnnnnnnnnnnnnnnnnnnnnnnnnnnnnnnnnnnnnnnnnnnnnnnnnnnnnnnnnnnnnnnnnnnnnnnnnnnnnnnnnnnnnnnnnnnnnnnnnnnnnnnnnnnnnnnnnnnnnnnnnnnnnnnnnnnnnnnnnnnnnnnnnnnnnnnnnnnnnnnnnnnnnnnnnnnnnnnnnnnnnnnnnnnnnnnnnnnnnnnnnnnnnnnnnnnnnnnnnnnnnnnnnnnnnnnnnnnnnnnnnnnnnnnnnnnnnnnnnnnnnnnnnnnnnnnnnnnnnnnnnnnnnnnnnnnnnnnnnnnnnnnnnnnnnnnnnnnnnnnnnnnnnnnnnnnnnnnnnnnnnnnnnnnnnnnnnnnnnnnnnnnnnnnnnnnnnnnnnnnnnnnnnnnnnnnnnnnnnnnnnnnnnnnnnnnnnnnnnnnnnnnnnnnnnnnnnnnnnnnnnnnnnnnnnnnnnnnnnnnnnnnnnnnnnnnnnnnnnnnnnnnnnnnnnnnnnnnnnnnnnnnnnnnnnnnnnnnnnnnnnnnnnnnnnnnnnnnnnnnnnnnnnnnnnnnnnnnnnnnnnnnnnnnnnnnnnnnnnnnnnnnnnnnnnnnnnnnnnnnnnnnnnnnnnnnnnnnnnnnnnnnnnnnnnnnnnnnnnnnnnnnnnnnnnnnnnnnnnnnnnnnnnnnnnnnnnnnnnnnnnnnnnnnnnnnnnnnnnnnnnnnnnnnnnnnnnnnnnnnnnnnnnnnnnnnnnnnnnnnnnnnnnnnnnnnnnnnnnnnnnnnnnnnnnnnnnnnnnnnnnnnnnnnnnnnnnnnnnnnnnnnnnnnnnnnnnnnnnnnnnnnnnnnnnnnnnnnnnnnnnnnnnnnnnnnnnnnnnnnnnnnnnnnnnnnnnnnnnnnnnnnnnnnnnnnnnnnnnnnnnnnnnnnnnnnnnnnnnnnnnnnnnnnnnnnnnnnnnnnnnnnnnnnnnnnnnnnnnnnnnnnnnnnnnnnnnnnnnnnnnnnnnnnnnnnnnnnnnnnnnnnnnnnnnnnnnnnnnnnnnnnnnnnnnnnnnnnnnnnnnnnnnnnnnnnnnnnnnnnnnnnnnnnnnnnnnnnnnnnnnnnnnnnnnnnnnnnnnnnnnnnnnnnnnnnnnnnnnnnnnnnnnnnnnnnnnnnnnnnnnnnnnnnnnnnnnnnnnnnnnnnnnnnnnnnnnnnnnnnnnnnnnnnnnnnnnnnnnnnnnnnnnnnnnnnnnnnnnnnnnnnnnnnnnnnnnnnnnnnnnnnnnnnnnnnnnnnnnnnnnnnnnnnnnnnnnnnnnnnnnnnnnnnnnnnnnnnnnnnnnnnnnnnnnnnnnnnnnnnnnnnnnnnnnnnnnnnnnnnnnnnnnnnnnnnnnnnnnnnnnnnnnnnnnnnnnnnnnnnnnnnnnnnnnnnnnnnnnnnnnnnnnnnnnnnnnnnnnnnnnnnnnnnnnnnnnnnnnnnnnnnnnnnnnnnnnnnnnnnnnnnnnnnnnnnnnnnnnnnnnnnnnnnnnnnnnnnnnnnnnnnnnnnnnnnnnnnnnnnnnnnnnnnnnnnnnnnnnnnnnnnnnnnnnnnnnnnnnnnnnnnnnnnnnnnnnnnnnnnnnnnnnnnnnnnnnnnnnnnnnnnnnnnnnnnnnnnnnnnnnnnnnnnnnnnnnnnnnnnnnnnnnnnnnnnnnnnnnnnnnnnnnnnnnnnnnnnnnnnnnnnnnnnnnnnnnnnnnnnnnnnnnnnnnnnnnnnnnnnnnnnnnnnnnnnnnnnnnnnnnnnnnnnnnnnnnnnnnnnnnnnnnnnnnnnnnnnnnnnnnnnnnnnnnnnnnnnnnnnnnnnnnnnnnnnnnnnnnnnnnnnnnnnnnnnnnnnnnnnnnnnnnnnnnnnnnnnnnnnnnnnnnnnnnnnnnnnnnnnnnnnnnnnnnnnnnnnnnnnnnnnnnnnnnnnnnnnnnnnnnnnnnnnnnnnnnnnnnnnnnnnnnnnnnnnnnnnnnnnnnnnnnnnnnnnnnnnnnnnnnnnnnnnnnnnnnnnnnnnnnnnnnnnnnnnnnnnnnnnnnnnnnnnnnnnnnnnnnnnnnnnnnnnnnnnnnnnnnnnnnnnnnnnnnnnnnnnnnnnnnnnnnnnnnnnnnnnnnnnnnnnnnnnnnnnnnnnnnnnnnnnnnnnnnnnnnnnnnnnnnnnnnnnnnnnnnnnnnnnnnnnnnnnnnnnnnnnnnnnnnnnnnnnnnnnnnnnnnnnnnnnnnnnnnnnnnnnnnnnnnnnnnnnnnnnnnnnnnnnnnnnnnnnnnnnnnnnnnnnnnnnnnnnnnnnnnnnnnnnnnnnnnnnnnnnnnnnnnnnnnnnnnnnnnnnnnnnnnnnnnnnnnnnnnnnnnnnnnnnnnnnnnnnnnnnnnnnnnnnnnnnnnnnnnnnnnnnnnnnnnnnnnnnnnnnnnnnnnnnnnnnnnnnnnnnnnnnnnnnnnnnnnnnnnnnnnnnnnnnnnnnnnnnnnnnnnnnnnnnnnnnnnnnnnnnnnnnnnnnnnnnnnnnnnnnnnnnnnnnnnnnnnnnnnnnnnnnnnnnnnnnnnnnnnnnnnnnnnnnnnnnnnnnnnnnnnnnnnnnnnnnnnnnnnnnnnnnnnnnnnnnnnnnnnnnnnnnnnnnnnnnnnnnnnnnnnnnnnnnnnnnnnnnnnnnnnnnnnnnnnnnnnnnnnnnnnnnnnnnnnnnnnnnnnnnnnnnnnnnnnnnnnnnnnnnnnnnnnnnnnnnnnnnnnnnnnnnnnnnnnnnnnnnnnnnnnnnnnnnnnnnnnnnnnnnnnnnnnnnnnnnnnnnnnnnnnnnnnnnnnnnnnnnnnnnnnnnnnnnnnnnnnnnnnnnnnnnnnnnnnnnnnnnnnnnnnnnnnnnnnnnnnnnnnnnnnnnnnnnnnnnnnnnnnnnnnnnnnnnnnnnnnnnnnnnnnnnnnnnnnnnnnnnnnnnnnnnnnnnnnnnnnnnnnnnnnnnnnnnnnnnnnnnnnnnnnnnnnnnnnnnnnnnnnnnnnnnnnnnnnnnnnnnnnnnnnnnnnnnnnnnnnnnnnnnnnnnnnnnnnnnnnnnnnnnnnnnnnnnnnnnnnnnnnnnnnnnnnnnnnnnnnnnnnnnnnnnnnnnnnnnnnnnnnnnnnnnnnnnnnnnnnnnnnnnnnnnnnnnnnnnnnnnnnnnnnnnnnnnnnnnnnnnnnnnnnnnnnnnnnnnnnnnnnnnnnnnnnnnnnnnnnnnnnnnnnnnnnnnnnnnnnnnnnnnnnnnnnnnnnnnnnnnnnnnnnnnnnnnnnnnnnnnnnnnnnnnnnnnnnnnnnnnnnnnnnnnnnnnnnnnnnnnnnnnnnnnnnnnnnnnnnnnnnnnnnnnnnnnnnnnnnnnnnnnnnnnnnnnnnnnnnnnnnnnnnnnnnnnnnnnnnnnnnnnnnnnnnnnnnnnnnnnnnnnnnnnnnnnnnnnnnnnnnnnnnnnnnnnnnnnnnnnnnnnnnnnnnnnnnnnnnnnnnnnnnnnnnnnnnnnnnnnnnnnnnnnnnnnnnnnnnnnnnnnnnnnnnnnnnnnnnnnnnnnnnnnnnnnnnnnnnnnnnnnnnnnnnnnnnnnnnnnnnnnnnnnnnnnnnnnnnnnnnnnnnnnnnnnnnnnnnnnnnnnnnnnnnnnnnnnnnnnnnnnnnnnnnnnnnnnnnnnnnnnnnnnnnnnnnnnnnnnnnnnnnnnnnnnnnnnnnnnnnnnnnnnnnnnnnnnnnnnnnnnnnnnnnnnnnnnnnnnnnnnnnnnnnnnnnnnnnnnnnnnnnnnnnnnnnnnnnnnnnnnnnnnnnnnnnnnnnnnnnnnnnnnnnnnnnnnnnnnnnnnnnnnnnnnnnnnnnnnnnnnnnnnnnnnnnnnnnnnnnnnnnnnnnnnnnnnnnnnnnnnnnnnnnnnnnnnnnnnnnnnnnnnnnnnnnnnnnnnnnnnnnnnnnnnnnnnnnnnnnnnnnnnnnnnnnnnnnnnnnnnnnnnnnnnnnnnnnnnnnnnnnnnnnnnnnnnnnnnnnnnnnnnnnnnnnnnnnnnnnnnnnnnnnnnnnnnnnnnnnnnnnnnnnnnnnnnnnnnnnnnnnnnnnnnnnnnnnnnnnnnnnnnnnnnnnnnnnnnnnnnnnnnnnnnnnnnnnnnnnnnnnnnnnnnnnnnnnnnnnnnnnnnnnnnnnnnnnnnnnnnnnnnnnnnnnnnnnnnnnnnnnnnnnnnnnnnnnnnnnnnnnnnnnnnnnnnnnnnnnnnnnnnnnnnnnnnnnnnnnnnnnnnnnnnnnnnnnnnnnnnnnnnnnnnnnnnnnnnnnnnnnnnnnnnnnnnnnnnnnnnnnnnnnnnnnnnnnnnnnnnnnnnnnnnnnnnnnnnnnnnnnnnnnnnnnnnnnnnnnnnnnnnnnnnnnnnnnnnnnnnnnnnnnnnnnnnnnnnnnnnnnnnnnnnnnnnnnnnnnnnnnnnnnnnnnnnnnnnnnnnnnnnnnnnnnnnnnnnnnnnnnnnnnnnnnnnnnnnnnnnnnnnnnnnnnnnnnnnnnnnnnnnnnnnnnnnnnnnnnnnnnnnnnnnnnnnnnnnnnnnnnnnnnnnnnnnnnnnnnnnnnnnnnnnnnnnnnnnnnnnnnnnnnnnnnnnnnnnnnnnnnnnnnnnnnnnnnnnnnnnnnnnnnnnnnnnnnnnnnnnnnnnnnnnnnnnnnnnnnnnnnnnnnnnnnnnnnnnnnnnnnnnnnnnnnnnnnnnnnnnnnnnnnnnnnnnnnnnnnnnnnnnnnnnnnnnnnnnnnnnnnnnnnnnnnnnnnnnnnnnnnnnnnnnnnnnnnnnnnnnnnnnnnnnnnnnnnnnnnnnnnnnnnnnnnnnnnnnnnnnnnnnnnnnnnnnnnnnnnnnnnnnnnnnnnnnnnnnnnnnnnnnnnnnnnnnnnnnnnnnnnnnnnnnnnnnnnnnnnnnnnnnnnnnnnnnnnnnnnnnnnnnnnnnnnnnnnnnnnnnnnnnnnnnnnnnnnnnnnnnnnnnnnnnnnnnnnnnnnnnnnnnnnnnnnnnnnnnnnnnnnnnnnnnnnnnnnnnnnnnnnnnnnnnnnnnnnnnnnnnnnnnnnnnnnnnnnnnnnnnnnnnnnnnnnnnnnnnnnnnnnnnnnnnnnnnnnnnnnnnnnnnnnnnnnnnnnnnnnnnnnnnnnnnnnnnnnnnnnnnnnnnnnnnnnnnnnnnnnnnnnnnnnnnnnnnnnnnnnnnnnnnnnnnnnnnnnnnnnnnnnnnnnnnnnnnnnnnnnnnnnnnnnnnnnnnnnnnnnnnnnnnnnnnnnnnnnnnnnnnnnnnnnnnnnnnnnnnnnnnnnnnnnnnnnnnnnnnnnnnnnnnnnnnnnnnnnnnnnnnnnnnnnnnnnnnnnnnnnnnnnnnnnnnnnnnnnnnnnnnnnnnnnnnnnnnnnnnnnnnnnnnnnnnnnnnnnnnnnnnnnnnnnnnnnnnnnnnnnnnnnnnnnnnnnnnnnnnnnnnnnnnnnnnnnnnnnnnnnnnnnnnnnnnnnnnnnnnnnnnnnnnnnnnnnnnnnnnnnnnnnnnnnnnnnnnnnnnnnnnnnnnnnnnnnnnnnnnnnnnnnnnnnnnnnnnnnnnnnnnnnnnnnnnnnnnnnnnnnnnnnnnnnnnnnnnnnnnnnnnnnnnnnnnnnnnnnnnnnnnnnnnnnnnnnnnnnnnnnnnnnnnnnnnnnnnnnnnnnnnnnnnnnnnnnnnnnnnnnnnnnnnnnnnnnnnnnnnnnnnnnnnnnnnnnnnnnnnnnnnnnnnnnnnnnnnnnnnnnnnnnnnnnnnnnnnnnnnnnnnnnnnnnnnnnnnnnnnnnnnnnnnnnnnnnnnnnnnnnnnnnnnnnnnnnnnnnnnnnnnnnnnnnnnnnnnnnnnnnnnnnnnnnnnnnnnnnnnnnnnnnnnnnnnnnnnnnnnnnnnnnnnnnnnnnnnnnnnnnnnnnnnnnnnnnnnnnnnnnnnnnnnnnnnnnnnnnnnnnnnnnnnnnnnnnnnnnnnnnnnnnnnnnnnnnnnnnnnnnnnnnnnnnnnnnnnnnnnnnnnnnnnnnnnnnnnnnnnnnnnnnnnnnnnnnnnnnnnnnnnnnnnnnnnnnnnnnnnnnnnnnnnnnnnnnnnnnnnnnnnnnnnnnnnnnnnnnnnnnnnnnnnnnnnnnnnnnnnnnnnnnnnnnnnnnnnnnnnnnnnnnnnnnnnnnnnnnnnnnnnnnnnnnnnnnnnnnnnnnnnnnnnnnnnnnnnnnnnnnnnnnnnnnnnnnnnnnnnnnnnnnnnnnnnnnnnnnnnnnnnnnnnnnnnnnnnnnnnnnnnnnnnnnnnnnnnnnnnnnnnnnnnnnnnnnnnnnnnnnnnnnnnnnnnnnnnnnnnnnnnnnnnnnnnnnnnnnnnnnnnnnnnnnnnnnnnnnnnnnnnnnnnnnnnnnnnnnnnnnnnnnnnnnnnnnnnnnnnnnnnnnnnnnnnnnnnnnnnnnnnnnnnnnnnnnnnnnnnnnnnnnnnnnnnnnnnnnnnnnnnnnnnnnnnnnnnnnnnnnnnnnnnnnnnnnnnnnnnnnnnnnnnnnnnnnnnnnnnnnnnnnnnnnnnnnnnnnnnnnnnnnnnnnnnnnnnnnnnnnnnnnnnnnnnnnnnnnnnnnnnnnnnnnnnnnnnnnnnnnnnnnnnnnnnnnnnnnnnnnnnnnnnnnnnnnnnnnnnnnnnnnnnnnnnnnnnnnnnnnnnnnnnnnnnnnnnnnnnnnnnnnnnnnnnnnnnnnnnnnnnnnnnnnnnnnnnnnnnnnnnnnnnnnnnnnnnnnnnnnnnnnnnnnnnnnnnnnnnnnnnnnnnnnnnnnnnnnnnnnnnnnnnnnnnnnnnnnnnnnnnnnnnnnnnnnnnnnnnnnnnnnnnnnnnnnnnnnnnnnnnnnnnnnnnnnnnnnnnnnnnnnnnnnnnnnnnnnnnnnnnnnnnnnnnnnnnnnnnnnnnnnnnnnnnnnnnnnnnnnnnnnnnnnnnnnnnnnnnnnnnnnnnnnnnnnnnnnnnnnnnnnnnnnnnnnnnnnnnnnnnnnnnnnnnnnnnnnnnnnnnnnnnnnnnnnnnnnnnnnnnnnnnnnnnnnnnnnnnnnnnnnnnnnnnnnnnnnnnnnnnnnnnnnnnnnnnnnnnnnnnnnnnnnnnnnnnnnnnnnnnnnnnnnnnnnnnnnnnnnnnnnnnnnnnnnnnnnnnnnnnnnnnnnnnnnnnnnnnnnnnnnnnnnnnnnnnnnnnnnnnnnnnnnnnnnnnnnnnnnnnnnnnnnnnnnnnnnnnnnnnnnnnnnnnnnnnnnnnnnnnnnnnnnnnnnnnnnnnnnnnnnnnnnnnnnnnnnnnnnnnnnnnnnnnnnnnnnnnnnnnnnnnnnnnnnnnnnnnnnnnnnnnnnnnnnnnnnnnnnnnnnnnnnnnnnnnnnnnnnnnnnnnnnnnnnnnnnnnnnnnnnnnnnnnnnnnnnnnnnnnnnnnnnnnnnnnnnnnnnnnnnnnnnnnnnnnnnnnnnnnnnnnnnnnnnnnnnnnnnnnnnnnnnnnnnnnnnnnnnnnnnnnnnnnnnnnnnnnnnnnnnnnnnnnnnnnnnnnnnnnnnnnnnnnnnnnnnnnnnnnnnnnnnnnnnnnnnnnnnnnnnnnnnnnnnnnnnnnnnnnnnnnnnnnnnnnnnnnnnnnnnnnnnnnnnnnnnnnnnnnnnnnnnnnnnnnnnnnnnnnnnnnnnnnnnnnnnnnnnnnnnnnnnnnnnnnnnnnnnnnnnnnnnnnnnnnnnnnnnnnnnnnnnnnnnnnnnnnnnnnnnnnnnnnnnnnnnnnnnnnnnnnnnnnnnnnnnnnnnnnnnnnnnnnnnnnnnnnnnnnnnnnnnnnnnnnnnnnnnnnnnnnnnnnnnnnnnnnnnnnnnnnnnnnnnnnnnnnnnnnnnnnnnnnnnnnnnnnnnnnnnnnnnnnnnnnnnnnnnnnnnnnnnnnnnnnnnnnnnnnnnnnnnnnnnnnnnnnnnnnnnnnnnnnnnnnnnnnnnnnnnnnnnnnnnnnnnnnnnnnnnnnnnnnnnnnnnnnnnnnnnnnnnnnnnnnnnnnnnnnnnnnnnnnnnnnnnnnnnnnnnnnnnnnnnnnnnnnnnnnnnnnnnnnnnnnnnnnnnnnnnnnnnnnnnnnnnnnnnnnnnnnnnnnnnnnnnnnnnnnnnnnnnnnnnnnnnnnnnnnnnnnnnnnnnnnnnnnnnnnnnnnnnnnnnnnnnnnnnnnnnnnnnnnnnnnnnnnnnnnnnnnnnnnnnnnnnnnnnnnnnnnnnnnnnnnnnnnnnnnnnnnnnnnnnnnnnnnnnnnnnnnnnnnnnnnnnnnnnnnnnnnnnnnnnnnnnnnnnnnnnnnnnnnnnnnnnnnnnnnnnnnnnnnnnnnnnnnnnnnnnnnnnnnnnnnnnnnnnnnnnnnnnnnnnnnnnnnnnnnnnnnnnnnnnnnnnnnnnnnnnnnnnnnnnnnnnnnnnnnnnnnnnnnnnnnnnnnnnnnnnnnnnnnnnnnnnnnnnnnnnnnnnnnnnnnnnnnnnnnnnnnnnnnnnnnnnnnnnnnnnnnnnnnnnnnnnnnnnnnnnnnnnnnnnnnnnnnnnnnnnnnnnnnnnnnnnnnnnnnnnnnnnnnnnnnnnnnnnnnnnnnnnnnnnnnnnnnnnnnnnnnnnnnnnnnnnnnnnnnnnnnnnnnnnnnnnnnnnnnnnnnnnnnnnnnnnnnnnnnnnnnnnnnnnnnnnnnnnnnnnnnnnnnnnnnnnnnnnnnnnnnnnnnnnnnnnnnnnnnnnnnnnnnnnnnnnnnnnnnnnnnnnnnnnnnnnnnnnnnnnnnnnnnnnnnnnnnnnnnnnnnnnnnnnnnnnnnnnnnnnnnnnnnnnnnnnnnnnnnnnnnnnnnnnnnnnnnnnnnnnnnnnnnnnnnnnnnnnnnnnnnnnnnnnnnnnnnnnnnnnnnnnnnnnnnnnnnnnnnnnnnnnnnnnnnnnnnnnnnnnnnnnnnnnnnnnnnnnnnnnnnnnnnnnnnnnnnnnnnnnnnnnnnnnnnnnnnnnnnnnnnnnnnnnnnnnnnnnnnnnnnnnnnnnnnnnnnnnnnnnnnnnnnnnnnnnnnnnnnnnnnnnnnnnnnnnnnnnnnnnnnnnnnnnnnnnnnnnnnnnnnnnnnnnnnnnnnnnnnnnnnnnnnnnnnnnnnnnnnnnnnnnnnnnnnnnnnnnnnnnnnnnnnnnnnnnnnnnnnnnnnnnnnnnnnnnnnnnnnnnnnnnnnnnnnnnnnnnnnnnnnnnnnnnnnnnnnnnnnnnnnnnnnnnnnnnnnnnnnnnnnnnnnnnnnnnnnnnnnnnnnnnnnnnnnnnnnnnnnnnnnnnnnnnnnnnnnnnnnnnnnnnnnnnnnnnnnnnnnnnnnnnnnnnnnnnnnnnnnnnnnnnnnnnnnnnnnnnnnnnnnnnnnnnnnnnnnnnnnnnnnnnnnnnnnnnnnnnnnnnnnnnnnnnnnnnnnnnnnnnnnnnnnnnnnnnnnnnnnnnnnnnnnnnnnnnnnnnnnnnnnnnnnnnnnnnnnnnnnnnnnnnnnnnnnnnnnnnnnnnnnnnnnnnnnnnnnnnnnnnnnnnnnnnnnnnnnnnnnnnnnnnnnnnnnnnnnnnnnnnnnnnnnnnnnnnnnnnnnnnnnnnnnnnnnnnnnnnnnnnnnnnnnnnnnnnnnnnnnnnnnnnnnnnnnnnnnnnnnnnnnnnnnnnnnnnnnnnnnnnnnnnnnnnnnnnnnnnnnnnnnnnnnnnnnnnnnnnnnnnnnnnnnnnnnnnnnnnnnnnnnnnnnnnnnnnnnnnnnnnnnnnnnnnnnnnnnnnnnnnnnnnnnnnnnnnnnnnnnnnnnnnnnnnnnnnnnnnnnnnnnnnnnnnnnnnnnnnnnnnnnnnnnnnnnnnnnnnnnnnnnnnnnnnnnnnnnnnnnnnnnnnnnnnnnnnnnnnnnnnnnnnnnnnnnnnnnnnnnnnnnnnnnnnnnnnnnnnnnnnnnnnnnnnnnnnnnnnnnnnnnnnnnnnnnnnnnnnnnnnnnnnnnnnnnnnnnnnnnnnnnnnnnnnnnnnnnnnnnnnnnnnnnnnnnnnnnnnnnnnnnnnnnnnnnnnnnnnnnnnnnnnnnnnnnnnnnnnnnnnnnnnnnnnnnnnnnnnnnnnnnnnnnnnnnnnnnnnnnnnnnnnnnnnnnnnnnnnnnnnnnnnnnnnnnnnnnnnnnnnnnnnnnnnnnnnnnnnnnnnnnnnnnnnnnnnnnnnnnnnnnnnnnnnnnnnnnnnnnnnnnnnnnnnnnnnnnnnnnnnnnnnnnnnnnnnnnnnnnnnnnnnnnnnnnnnnnnnnnnnnnnnnnnnnnnnnnnnnnnnnnnnnnnnnnnnnnnnnnnnnnnnnnnnnnnnnnnnnnnnnnnnnnnnnnnnnnnnnnnnnnnnnnnnnnnnnnnnnnnnnnnnnnnnnnnnnnnnnnnnnnnnnnnnnnnnnnnnnnnnnnnnnnnnnnnnnnnnnnnnnnnnnnnnnnnnnnnnnnnnnnnnnnnnnnnnnnnnnnnnnnnnnnnnnnnnnnnnnnnnnnnnnnnnnnnnnnnnnnnnnnnnnnnnnnnnnnnnnnnnnnnnnnnnnnnnnnnnnnnnnnnnnnnnnnnnnnnnnnnnnnnnnnnnnnnnnnnnnnnnnnnnnnnnnnnnnnnnnnnnnnnnnnnnnnnnnnnnnnnnnnnnnnnnnnnnnnnnnnnnnnnnnnnnnnnnnnnnnnnnnnnnnnnnnnnnnnnnnnnnnnnnnnnnnnnnnnnnnnnnnnnnnnnnnnnnnnnnnnnnnnnnnnnnnnnnnnnnnnnnnnnnnnnnnnnnnnnnnnnnnnnnnnnnnnnnnnnnnnnnnnnnnnnnnnnnnnnnnnnnnnnnnnnnnnnnnnnnnnnnnnnnnnnnnnnnnnnnnnnnnnnnnnnnnnnnnnnnnnnnnnnnnnnnnnnnnnnnnnnnnnnnnnnnnnnnnnnnnnnnnnnnnnnnnnnnnnnnnnnnnnnnnnnnnnnnnnnnnnnnnnnnnnnnnnnnnnnnnnnnnnnnnnnnnnnnnnnnnnnnnnnnnnnnnnnnnnnnnnnnnnnnnnnnnnnnnnnnnnnnnnnnnnnnnnnnnnnnnnnnnnnnnnnnnnnnnnnnnnnnnnnnnnnnnnnnnnnnnnnnnnnnnnnnnnnnnnnnnnnnnnnnnnnnnnnnnnnnnnnnnnnnnnnnnnnnnnnnnnnnnnnnnnnnnnnnnnnnnnnnnnnnnnnnnnnnnnnnnnnnnnnnnnnnnnnnnnnnnnnnnnnnnnnnnnnnnnnnnnnnnnnnnnnnnnnnnnnnnnnnnnnnnnnnnnnnnnnnnnnnnnnnnnnnnnnnnnnnnnnnnnnnnnnnnnnnnnnnnnnnnnnnnnnnnnnnnnnnnnnnnnnnnnnnnnnnnnnnnnnnnnnnnnnnnnnnnnnnnnnnnnnnnnnnnnnnnnnnnnnnnnnnnnnnnnnnnnnnnnnnnnnnnnnnnnnnnnnnnnnnnnnnnnnnnnnnnnnnnnnnnnnnnnnnnnnnnnnnnnnnnnnnnnnnnnnnnnnnnnnnnnnnnnnnnnnnnnnnnnnnnnnnnnnnnnnnnnnnnnnnnnnnnnnnnnnnnnnnnnnnnnnnnnnnnnnnnnnnnnnnnnnnnnnnnnnnnnnnnnnnnnnnnnnnnnnnnnnnnnnnnnnnnnnnnnnnnnnnnnnnnnnnnnnnnnnnnnnnnnnnnnnnnnnnnnnnnnnnnnnnnnnnnnnnnnnnnnnnnnnnnnnnnnnnnnnnnnnnnnnnnnnnnnnnnnnnnnnnnnnnnnnnnnnnnnnnnnnnnnnnnnnnnnnnnnnnnnnnnnnnnnnnnnnnnnnnnnnnnnnnnnnnnnnnnnnnnnnnnnnnnnnnnnnnnnnnnnnnnnnnnnnnnnnnnnnnnnnnnnnnnnnnnnnnnnnnnnnnnnnnnnnnnnnnnnnnnnnnnnnnnnnnnnnnnnnnnnnnnnnnnnnnnnnnnnnnnnnnnnnnnnnnnnnnnnnnnnnnnnnnnnnnnnnnnnnnnnnnnnnnnnnnnnnnnnnnnnnnnnnnnnnnnnnnnnnnnnnnnnnnnnnnnnnnnnnnnnnnnnnnnnnnnnnnnnnnnnnnnnnnnnnnnnnnnnnnnnnnnnnnnnnnnnnnnnnnnnnnnnnnnnnnnnnnnnnnnnnnnnnnnnnnnnnnnnnnnnnnnnnnnnnnnnnnnnnnnnnnnnnnnnnnnnnnnnnnnnnnnnnnnnnnnnnnnnnnnnnnnnnnnnnnnnnnnnnnnnnnnnnnnnnnnnnnnnnnnnnnnnnnnnnnnnnnnnnnnnnnnnnnnnnnnnnnnnnnnnnnnnnnnnnnnnnnnnnnnnnnnnnnnnnnnnnnnnnnnnnnnnnnnnnnnnnnnnnnnnnnnnnnnnnnnnnnnnnnnnnnnnnnnnnnnnnnnnnnnnnnnnnnnnnnnnnnnnnnnnnnnnnnnnnnnnnnnnnnnnnnnnnnnnnnnnnnnnnnnnnnnnnnnnnnnnnnnnnnnnnnnnnnnnnnnnnnnnnnnnnnnnnnnnnnnnnnnnnnnnnnnnnnnnnnnnnnnnnnnnnnnnnnnnnnnnnnnnnnnnnnnnnnnnnnnnnnnnnnnnnnnnnnnnnnnnnnnnnnnnnnnnnnnnnnnnnnnnnnnnnnnnnnnnnnnnnnnnnnnnnnnnnnnnnnnnnnnnnnnnnnnnnnnnnnnnnnnnnnnnnnnnnnnnnnnnnnnnnnnnnnnnnnnnnnnnnnnnnnnnnnnnnnnnnnnnnnnnnnnnnnnnnnnnnnnnnnnnnnnnnnnnnnnnnnnnnnnnnnnnnnnnnnnnnnnnnnnnnnnnnnnnnnnnnnnnnnnnnnnnnnnnnnnnnnnnnnnnnnnnnnnnnnnnnnnnnnnnnnnnnnnnnnnnnnnnnnnnnnnnnnnnnnnnnnnnnnnnnnnnnnnnnnnnnnnnnnnnnnnnnnnnnnnnnnnnnnnnnnnnnnnnnnnnnnnnnnnnnnnnnnnnnnnnnnnnnnnnnnnnnnnnnnnnnnnnnnnnnnnnnnnnnnnnnnnnnnnnnnnnnnnnnnnnnnnnnnnnnnnnnnnnnnnnnnnnnnnnnnnnnnnnnnnnnnnnnnnnnnnnnnnnnnnnnnnnnnnnnnnnnnnnnnnnnnnnnnnnnnnnnnnnnnnnnnnnnnnnnnnnnnnnnnnnnnnnnnnnnnnnnnnnnnnnnnnnnnnnnnnnnnnnnnnnnnnnnnnnnnnnnnnnnnnnnnnnnnnnnnnnnnnnnnnnnnnnnnnnnnnnnnnnnnnnnnnnnnnnnnnnnnnnnnnnnnnnnnnnnnnnnnnnnnnnnnnnnnnnnnnnnnnnnnnnnnnnnnnnnnnnnnnnnnnnnnnnnnnnnnnnnnnnnnnnnnnnnnnnnnnnnnnnnnnnnnnnnnnnnnnnnnnnnnnnnnnnnnnnnnnnnnnnnnnnnnnnnnnnnnnnnnnnnnnnnnnnnnnnnnnnnnnnnnnnnnnnnnnnnnnnnnnnnnnnnnnnnnnnnnnnnnnnnnnnnnnnnnnnnnnnnnnnnnnnnnnnnnnnnnnnnnnnnnnnnnnnnnnnnnnnnnnnnnnnnnnnnnnnnnnnnnnnnnnnnnnnnnnnnnnnnnnnnnnnnnnnnnnnnnnnnnnnnnnnnnnnnnnnnnnnnnnnnnnnnnnnnnnnnnnnnnnnnnnnnnnnnnnnnnnnnnnnnnnnnnnnnnnnnnnnnnnnnnnnnnnnnnnnnnnnnnnnnnnnnnnnnnnnnnnnnnnnnnnnnnnnnnnnnnnnnnnnnnnnnnnnnnnnnnnnnnnnnnnnnnnnnnnnnnnnnnnnnnnnnnnnnnnnnnnnnnnnnnnnnnnnnnnnnnnnnnnnnnnnnnnnnnnnnnnnnnnnnnnnnnnnnnnnnnnnnnnnnnnnnnnnnnnnnnnnnnnnnnnnnnnnnnnnnnnnnnnnnnnnnnnnnnnnnnnnnnnnnnnnnnnnnnnnnnnnnnnnnnnnnnnnnnnnnnnnnnnnnnnnnnnnnnnnnnnnnnnnnnnnnnnnnnnnnnnnnnnnnnnnnnnnnnnnnnnnnnnnnnnnnnnnnnnnnnnnnnnnnnnnnnnnnnnnnnnnnnnnnnnnnnnnnnnnnnnnnnnnnnnnnnnnnnnnnnnnnnnnnnnnnnnnnnnnnnnnnnnnnnnnnnnnnnnnnnnnnnnnnnnnnnnnnnnnnnnnnnnnnnnnnnnnnnnnnnnnnnnnnnnnnnnnnnnnnnnnnnnnnnnnnnnnnnnnnnnnnnnnnnnnnnnnnnnnnnnnnnnnnnnnnnnnnnnnnnnnnnnnnnnnnnnnnnnnnnnnnnnnnnnnnnnnnnnnnnnnnnnnnnnnnnnnnnnnnnnnnnnnnnnnnnnnnnnnnnnnnnnnnnnnnnnnnnnnnnnnnnnnnnnnnnnnnnnnnnnnnnnnnnnnnnnnnnnnnnnnnnnnnnnnnnnnnnnnnnnnnnnnnnnnnnnnnnnnnnnnnnnnnnnnnnnnnnnnnnnnnnnnnnnnnnnnnnnnnnnnnnnnnnnnnnnnnnnnnnnnnnnnnnnnnnnnnnnnnnnnnnnnnnnnnnnnnnnnnnnnnnnnnnnnnnnnnnnnnnnnnnnnnnnnnnnnnnnnnnnnnnnnnnnnnnnnnnnnnnnnnnnnnnnnnnnnnnnnnnnnnnnnnnnnnnnnnnnnnnnnnnnnnnnnnnnnnnnnnnnnnnnnnnnnnnnnnnnnnnnnnnnnnnnnnnnnnnnnnnnnnnnnnnnnnnnnnnnnnnnnnnnnnnnnnnnnnnnnnnnnnnnnnnnnnnnnnnnnnnnnnnnnnnnnnnnnnnnnnnnnnnnnnnnnnnnnnnnnnnnnnnnnnnnnnnnnnnnnnnnnnnnnnnnnnnnnnnnnnnnnnnnnnnnnnnnnnnnnnnnnnnnnnnnnnnnnnnnnnnnnnnnnnnnnnnnnnnnnnnnnnnnnnnnnnnnnnnnnnnnnnnnnnnnnnnnnnnnnnnnnnnnnnnnnnnnnnnnnnnnnnnnnnnnnnnnnnnnnnnnnnnnnnnnnnnnnnnnnnnnnnnnnnnnnnnnnnnnnnnnnnnnnnnnnnnnnnnnnnnnnnnnnnnnnnnnnnnnnnnnnnnnnnnnnnnnnnnnnnnnnnnnnnnnnnnnnnnnnnnnnnnnnnnnnnnnnnnnnnnnnnnnnnnnnnnnnnnnnnnnnnnnnnnnnnnnnnnnnnnnnnnnnnnnnnnnnnnnnnnnnnnnnnnnnnnnnnnnnnnnnnnnnnnnnnnnnnnnnnnnnnnnnnnnnnnnnnnnnnnnnnnnnnnnnnnnnnnnnnnnnnnnnnnnnnnnnnnnnnnnnnnnnnnnnnnnnnnnnnnnnnnnnnnnnnnnnnnnnnnnnnnnnnnnnnnnnnnnnnnnnnnnnnnnnnnnnnnnnnnnnnnnnnnnnnnnnnnnnnnnnnnnnnnnnnnnnnnnnnnnnnnnnnnnnnnnnnnnnnnnnnnnnnnnnnnnnnnnnnnnnnnnnnnnnnnnnnnnnnnnnnnnnnnnnnnnnnnnnnnnnnnnnnnnnnnnnnnnnnnnnnnnnnnnnnnnnnnnnnnnnnnnnnnnnnnnnnnnnnnnnnnnnnnnnnnnnnnnnnnnnnnnnnnnnnnnnnnnnnnnnnnnnnnnnnnnnnnnnnnnnnnnnnnnnnnnnnnnnnnnnnnnnnnnnnnnnnnnnnnnnnnnnnnnnnnnnnnnnnnnnnnnnnnnnnnnnnnnnnnnnnnnnnnnnnnnnnnnnnnnnnnnnnnnnnnnnnnnnnnnnnnnnnnnnnnnnnnnnnnnnnnnnnnnnnnnnnnnnnnnnnnnnnnnnnnnnnnnnnnnnnnnnnnnnnnnnnnnnnnnnnnnnnnnnnnnnnnnnnnnnnnnnnnnnnnnnnnnnnnnnnnnnnnnnnnnnnnnnnnnnnnnnnnnnnnnnnnnnnnnnnnnnnnnnnnnnnnnnnnnnnnnnnnnnnnnnnnnnnnnnnnnnnnnnnnnnnnnnnnnnnnnnnnnnnnnnnnnnnnnnnnnnnnnnnnnnnnnnnnnnnnnnnnnnnnnnnnnnnnnnnnnnnnnnnnnnnnnnnnnnnnnnnnnnnnnnnnnnnnnnnnnnnnnnnnnnnnnnnnnnnnnnnnnnnnnnnnnnnnnnnnnnnnnnnnnnnnnnnnnnnnnnnnnnnnnnnnnnnnnnnnnnnnnnnnnnnnnnnnnnnnnnnnnnnnnnnnnnnnnnnnnnnnnnnnnnnnnnnnnnnnnnnnnnnnnnnnnnnnnnnnnnnnnnnnnnnnnnnnnnnnnnnnnnnnnnnnnnnnnnnnnnnnnnnnnnnnnnnnnnnnnnnnnnnnnnnnnnnnnnnnnnnnnnnnnnnnnnnnnnnnnnnnnnnnnnnnnnnnnnnnnnnnnnnnnnnnnnnnnnnnnnnnnnnnnnnnnnnnnnnnnnnnnnnnnnnnnnnnnnnnnnnnnnnnnnnnnnnnnnnnnnnnnnnnnnnnnnnnnnnnnnnnnnnnnnnnnnnnnnnnnnnnnnnnnnnnnnnnnnnnnnnnnnnnnnnnnnnnnnnnnnnnnnnnnnnnnnnnnnnnnnnnnnnnnnnnnnnnnnnnnnnnnnnnnnnnnnnnnnnnnnnnnnnnnnnnnnnnnnnnnnnnnnnnnnnnnnnnnnnnnnnnnnnnnnnnnnnnnnnnnnnnnnnnnnnnnnnnnnnnnnnnnnnnnnnnnnnnnnnnnnnnnnnnnnnnnnnnnnnnnnnnnnnnnnnnnnnnnnnnnnnnnnnnnnnnnnnnnnnnnnnnnnnnnnnnnnnnnnnnnnnnnnnnnnnnnnnnnnnnnnnnnnnnnnnnnnnnnnnnnnnnnnnnnnnnnnnnnnnnnnnnnnnnnnnnnnnnnnnnnnnnnnnnnnnnnnnnnnnnnnnnnnnnnnnnnnnnnnnnnnnnnnnnnnnnnnnnnnnnnnnnnnnnnnnnnnnnnnnnnnnnnnnnnnnnnnnnnnnnnnnnnnnnnnnnnnnnnnnnnnnnnnnnnnnnnnnnnnnnnnnnnnnnnnnnnnnnnnnnnnnnnnnnnnnnnnnnnnnnnnnnnnnnnnnnnnnnnnnnnnnnnnnnnnnnnnnnnnnnnnnnnnnnnnnnnnnnnnnnnnnnnnnnnnnnnnnnnnnnnnnnnnnnnnnnnnnnnnnnnnnnnnnnnnnnnnnnnnnnnnnnnnnnnnnnnnnnnnnnnnnnnnnnnnnnnnnnnnnnnnnnnnnnnnnnnnnnnnnnnnnnnnnnnnnnnnnnnnnnnnnnnnnnnnnnnnnnnnnnnnnnnnnnnnnnnnnnnnnnnnnnnnnnnnnnnnnnnnnnnnnnnnnnnnnnnnnnnnnnnnnnnnnnnnnnnnnnnnnnnnnnnnnnnnnnnnnnnnnnnnnnnnnnnnnnnnnnnnnnnnnnnnnnnnnnnnnnnnnnnnnnnnnnnnnnnnnnnnnnnnnnnnnnnnnnnnnnnnnnnnnnnnnnnnnnnnnnnnnnnnnnnnnnnnnnnnnnnnnnnnnnnnnnnnnnnnnnnnnnnnnnnnnnnnnnnnnnnnnnnnnnnnnnnnnnnnnnnnnnnnnnnnnnnnnnnnnnnnnnnnnnnnnnnnnnnnnnnnnnnnnnnnnnnnnnnnnnnnnnnnnnnnnnnnnnnnnnnnnnnnnnnnnnnnnnnnnnnnnnnnnnnnnnnnnnnnnnnnnnnnnnnnnnnnnnnnnnnnnnnnnnnnnnnnnnnnnnnnnnnnnnnnnnnnnnnnnnnnnnnnnnnnnnnnnnnnnnnnnnnnnnnnnnnnnnnnnnnnnnnnnnnnnnnnnnnnnnnnnnnnnnnnnnnnnnnnnnnnnnnnnnnnnnnnnnnnnnnnnnnnnnnnnnnnnnnnnnnnnnnnnnnnnnnnnnnnnnnnnnnnnnnnnnnnnnnnnnnnnnnnnnnnnnnnnnnnnnnnnnnnnnnnnnnnnnnnnnnnnnnnnnnnnnnnnnnnnnnnnnnnnnnnnnnnnnnnnnnnnnnnnnnnnnnnnnnnnnnnnnnnnnnnnnnnnnnnnnnnnnnnnnnnnnnnnnnnnnnnnnnnnnnnnnnnnnnnnnnnnnnnnnnnnnnnnnnnnnnnnnnnnnnnnnnnnnnnnnnnnnnnnnnnnnnnnnnnnnnnnnnnnnnnnnnnnnnnnnnnnnnnnnnnnnnnnnnnnnnnnnnnnnnnnnnnnnnnnnnnnnnnnnnnnnnnnnnnnnnnnnnnnnnnnnnnnnnnnnnnnnnnnnnnnnnnnnnnnnnnnnnnnnnnnnnnnnnnnnnnnnnnnnnnnnnnnnnnnnnnnnnnnnnnnnnnnnnnnnnnnnnnnnnnnnnnnnnnnnnnnnnnnnnnnnnnnnnnnnnnnnnnnnnnnnnnnnnnnnnnnnnnnnnnnnnnnnnnnnnnnnnnnnnnnnnnnnnnnnnnnnnnnnnnnnnnnnnnnnnnnnnnnnnnnnnnnnnnnnnnnnnnnnnnnnnnnnnnnnnnnnnnnnnnnnnnnnnnnnnnnnnnnnnnnnnnnnnnnnnnnnnnnnnnnnnnnnnnnnnnnnnnnnnnnnnnnnnnnnnnnnnnnnnnnnnnnnnnnnnnnnnnnnnnnnnnnnnnnnnnnnnnnnnnnnnnnnnnnnnnnnnnnnnnnnnnnnnnnnnnnnnnnnnnnnnnnnnnnnnnnnnnnnnnnnnnnnnnnnnnnnnnnnnnnnnnnnnnnnnnnnnnnnnnnnnnnnnnnnnnnnnnnnnnnnnnnnnnnnnnnnnnnnnnnnnnnnnnnnnnnnnnnnnnnnnnnnnnnnnnnnnnnnnnnnnnnnnnnnnnnnnnnnnnnnnnnnnnnnnnnnnnnnnnnnnnnnnnnnnnnnnnnnnnnnnnnnnnnnnnnnnnnnnnnnnnnnnnnnnnnnnnnnnnnnnnnnnnnnnnnnnnnnnnnnnnnnnnnnnnnnnnnnnnnnnnnnnnnnnnnnnnnnnnnnnnnnnnnnnnnnnnnnnnnnnnnnnnnnnnnnnnnnnnnnnnnnnnnnnnnnnnnnnnnnnnnnnnnnnnnnnnnnnnnnnnnnnnnnnnnnnnnnnnnnnnnnnnnnnnnnnnnnnnnnnnnnnnnnnnnnnnnnnnnnnnnnnnnnnnnnnnnnnnnnnnnnnnnnnnnnnnnnnnnnnnnnnnnnnnnnnnnnnnnnnnnnnnnnnnnnnnnnnnnnnnnnnnnnnnnnnnnnnnnnnnnnnnnnnnnnnnnnnnnnnnnnnnnnnnnnnnnnnnnnnnnnnnnnnnnnnnnnnnnnnnnnnnnnnnnnnnnnnnnnnnnnnnnnnnnnnnnnnnnnnnnnnnnnnnnnnnnnnnnnnnnnnnnnnnnnnnnnnnnnnnnnnnnnnnnnnnnnnnnnnnnnnnnnnnnnnnnnnnnnnnnnnnnnnnnnnnnnnnnnnnnnnnnnnnnnnnnnnnnnnnnnnnnnnnnnnnnnnnnnnnnnnnnnnnnnnnnnnnnnnnnnnnnnnnnnnnnnnnnnnnnnnnnnnnnnnnnnnnnnnnnnnnnnnnnnnnnnnnnnnnnnnnnnnnnnnnnnnnnnnnnnnnnnnnnnnnnnnnnnnnnnnnnnnnnnnnnnnnnnnnnnnnnnnnnnnnnnnnnnnnnnnnnnnnnnnnnnnnnnnnnnnnnnnnnnnnnnnnnnnnnnnnnnnnnnnnnnnnnnnnnnnnnnnnnnnnnnnnnnnnnnnnnnnnnnnnnnnnnnnnnnnnnnnnnnnnnnnnnnnnnnnnnnnnnnnnnnnnnnnnnnnnnnnnnnnnnnnnnnnnnnnnnnnnnnnnnnnnnnnnnnnnnnnnnnnnnnnnnnnnnnnnnnnnnnnnnnnnnnnnnnnnnnnnnnnnnnnnnnnnnnnnnnnnnnnnnnnnnnnnnnnnnnnnnnnnnnnnnnnnnnnnnnnnnnnnnnnnnnnnnnnnnnnnnnnnnnnnnnnnnnnnnnnnnnnnnnnnnnnnnnnnnnnnnnnnnnnnnnnnnnnnnnnnnnnnnnnnnnnnnnnnnnnnnnnnnnnnnnnnnnnnnnnnnnnnnnnnnnnnnnnnnnnnnnnnnnnnnnnnnnnnnnnnnnnnnnnnnnnnnnnnnnnnnnnnnnnnnnnnnnnnnnnnnnnnnnnnnnnnnnnnnnnnnnnnnnnnnnnnnnnnnnnnnnnnnnnnnnnnnnnnnnnnnnnnnnnnnnnnnnnnnnnnnnnnnnnnnnnnnnnnnnnnnnnnnnnnnnnnnnnnnnnnnnnnnnnnnnnnnnnnnnnnnnnnnnnnnnnnnnnnnnnnnnnnnnnnnnnnnnnnnnnnnnnnnnnnnnnnnnnnnnnnnnnnnnnnnnnnnnnnnnnnnnnnnnnnnnnnnnnnnnnnnnnnnnnnnnnnnnnnnnnnnnnnnnnnnnnnnnnnnnnnnnnnnnnnnnnnnnnnnnnnnnnnnnnnnnnnnnnnnnnnnnnnnnnnnnnnnnnnnnnnnnnnnnnnnnnnnnnnnnnnnnnnnnnnnnnnnnnnnnnnnnnnnnnnnnnnnnnnnnnnnnnnnnnnnnnnnnnnnnnnnnnnnnnnnnnnnnnnnnnnnnnnnnnnnnnnnnnnnnnnnnnnnnnnnnnnnnnnnnnnnnnnnnnnnnnnnnnnnnnnnnnnnnnnnnnnnnnnnnnnnnnnnnnnnnnnnnnnnnnnnnnnnnnnnnnnnnnnnnnnnnnnnnnnnnnnnnnnnnnnnnnnnnnnnnnnnnnnnnnnnnnnnnnnnnnnnnnnnnnnnnnnnnnnnnnnnnnnnnnnnnnnnnnnnnnnnnnnnnnnnnnnnnnnnnnnnnnnnnnnnnnnnnnnnnnnnnnnnnnnnnnnnnnnnnnnnnnnnnnnnnnnnnnnnnnnnnnnnnnnnnnnnnnnnnnnnnnnnnnnnnnnnnnnnnnnnnnnnnnnnnnnnnnnnnnnnnnnnnnnnnnnnnnnnnnnnnnnnnnnnnnnnnnnnnnnnnnnnnnnnnnnnnnnnnnnnnnnnnnnnnnnnnnnnnnnnnnnnnnnnnnnnnnnnnnnnnnnnnnnnnnnnnnnnnnnnnnnnnnnnnnnnnnnnnnnnnnnnnnnnnnnnnnnnnnnnnnnnnnnnnnnnnnnnnnnnnnnnnnnnnnnnnnnnnnnnnnnnnnnnnnnnnnnnnnnnnnnnnnnnnnnnnnnnnnnnnnnnnnnnnnnnnnnnnnnnnnnnnnnnnnnnnnnnnnnnnnnnnnnnnnnnnnnnnnnnnnnnnnnnnnnnnnnnnnnnnnnnnnnnnnnnnnnnnnnnnnnnnnnnnnnnnnnnnnnnnnnnnnnnnnnnnnnnnnnnnnnnnnnnnnnnnnnnnnnnnnnnnnnnnnnnnnnnnnnnnnnnnnnnnnnnnnnnnnnnnnnnnnnnnnnnnnnnnnnnnnnnnnnnnnnnnnnnnnnnnnnnnnnnnnnnnnnnnnnnnnnnnnnnnnnnnnnnnnnnnnnnnnnnnnnnnnnnnnnnnnnnnnnnnnnnnnnnnnnnnnnnnnnnnnnnnnnnnnnnnnnnnnnnnnnnnnnnnnnnnnnnnnnnnnnnnnnnnnnnnnnnnnnnnnnnnnnnnnnnnnnnnnnnnnnnnnnnnnnnnnnnnnnnnnnnnnnnnnnnnnnnnnnnnnnnnnnnnnnnnnnnnnnnnnnnnnnnnnnnnnnnnnnnnnnnnnnnnnnnnnnnnnnnnnnnnnnnnnnnnnnnnnnnnnnnnnnnnnnnnnnnnnnnnnnnnnnnnnnnnnnnnnnnnnnnnnnnnnnnnnnnnnnnnnnnnnnnnnnnnnnnnnnnnnnnnnnnnnnnnnnnnnnnnnnnnnnnnnnnnnnnnnnnnnnnnnnnnnnnnnnnnnnnnnnnnnnnnnnnnnnnnnnnnnnnnnnnnnnnnnnnnnnnnnnnnnnnnnnnnnnnnnnnnnnnnnnnnnnnnnnnnnnnnnnnnnnnnnnnnnnnnnnnnnnnnnnnnnnnnnnnnnnnnnnnnnnnnnnnnnnnnnnnnnnnnnnnnnnnnnnnnnnnnnnnnnnnnnnnnnnnnnnnnnnnnnnnnnnnnnnnnnnnnnnnnnnnnnnnnnnnnnnnnnnnnnnnnnnnnnnnnnnnnnnnnnnnnnnnnnnnnnnnnnnnnnnnnnnnnnnnnnnnnnnnnnnnnnnnnnnnnnnnnnnnnnnnnnnnnnnnnnnnnnnnnnnnnnnnnnnnnnnnnnnnnnnnnnnnnnnnnnnnnnnnnnnnnnnnnnnnnnnnnnnnnnnnnnnnnnnnnnnnnnnnnnnnnnnnnnnnnnnnnnnnnnnnnnnnnnnnnnnnnnnnnnnnnnnnnnnnnnnnnnnnnnnnnnnnnnnnnnnnnnnnnnnnnnnnnnnnnnnnnnnnnnnnnnnnnnnnnnnnnnnnnnnnnnnnnnnnnnnnnnnnnnnnnnnnnnnnnnnnnnnnnnnnnnnnnnnnnnnnnnnnnnnnnnnnnnnnnnnnnnnnnnnnnnnnnnnnnnnnnnnnnnnnnnnnnnnnnnnnnnnnnnnnnnnnnnnnnnnnnnnnnnnnnnnnnnnnnnnnnnnnnnnnnnnnnnnnnnnnnnnnnnnnnnnnnnnnnnnnnnnnnnnnnnnnnnnnnnnnnnnnnnnnnnnnnnnnnnnnnnnnnnnnnnnnnnnnnnnnnnnnnnnnnnnnnnnnnnnnnnnnnnnnnnnnnnnnnnnnnnnnnnnnnnnnnnnnnnnnnnnnnnnnnnnnnnnnnnnnnnnnnnnnnnnnnnnnnnnnnnnnnnnnnnnnnnnnnnnnnnnnnnnnnnnnnnnnnnnnnnnnnnnnnnnnnnnnnnnnnnnnnnnnnnnnnnnnnnnnnnnnnnnnnnnnnnnnnnnnnnnnnnnnnnnnnnnnnnnnnnnnnnnnnnnnnnnnnnnnnnnnnnnnnnnnnnnnnnnnnnnnnnnnnnnnnnnnnnnnnnnnnnnnnnnnnnnnnnnnnnnnnnnnnnnnnnnnnnnnnnnnnnnnnnnnnnnnnnnnnnnnnnnnnnnnnnnnnnnnnnnnnnnnnnnnnnnnnnnnnnnnnnnnnnnnnnnnnnnnnnnnnnnnnnnnnnnnnnnnnnnnnnnnnnnnnnnnnnnnnnnnnnnnnnnnnnnnnnnnnnnnnnnnnnnnnnnnnnnnnnnnnnnnnnnnnnnnnnnnnnnnnnnnnnnnnnnnnnnnnnnnnnnnnnnnnnnnnnnnnnnnnnnnnnnnnnnnnnnnnnnnnnnnnnnnnnnnnnnnnnnnnnnnnnnnnnnnnnnnnnnnnnnnnnnnnnnnnnnnnnnnnnnnnnnnnnnnnnnnnnnnnnnnnnnnnnnnnnnnnnnnnnnnnnnnnnnnnnnnnnnnnnnnnnnnnnnnnnnnnnnnnnnnnnnnnnnnnnnnnnnnnnnnnnnnnnnnnnnnnnnnnnnnnnnnnnnnnnnnnnnnnnnnnnnnnnnnnnnnnnnnnnnnnnnnnnnnnnnnnnnnnnnnnnnnnnnnnnnnnnnnnnnnnnnnnnnnnnnnnnnnnnnnnnnnnnnnnnnnnnnnnnnnnnnnnnnnnnnnnnnnnnnnnnnnnnnnnnnnnnnnnnnnnnnnnnnnnnnnnnnnnnnnnnnnnnnnnnnnnnnnnnnnnnnnnnnnnnnnnnnnnnnnnnnnnnnnnnnnnnnnnnnnnnnnnnnnnnnnnnnnnnnnnnnnnnnnnnnnnnnnnnnnnnnnnnnnnnnnnnnnnnnnnnnnnnnnnnnnnnnnnnnnnnnnnnnnnnnnnnnnnnnnnnnnnnnnnnnnnnnnnnnnnnnnnnnnnnnnnnnnnnnnnnnnnnnnnnnnnnnnnnnnnnnnnnnnnnnnnnnnnnnnnnnnnnnnnnnnnnnnnnnnnnnnnnnnnnnnnnnnnnnnnnnnnnnnnnnnnnnnnnnnnnnnnnnnnnnnnnnnnnnnnnnnnnnnnnnnnnnnnnnnnnnnnnnnnnnnnnnnnnnnnnnnnnnnnnnnnnnnnnnnnnnnnnnnnnnnnnnnnnnnnnnnnnnnnnnnnnnnnnnnnnnnnnnnnnnnnnnnnnnnnnnnnnnnnnnnnnnnnnnnnnnnnnnnnnnnnnnnnnnnnnnnnnnnnnnnnnnnnnnnnnnnnnnnnnnnnnnnnnnnnnnnnnnnnnnnnnnnnnnnnnnnnnnnnnnnnnnnnnnnnnnnnnnnnnnnnnnnnnnnnnnnnnnnnnnnnnnnnnnnnnnnnnnnnnnnnnnnnnnnnnnnnnnnnnnnnnnnnnnnnnnnnnnnnnnnnnnnnnnnnnnnnnnnnnnnnnnnnnnnnnnnnnnnnnnnnnnnnnnnnnnnnnnnnnnnnnnnnnnnnnnnnnnnnnnnnnnnnnnnnnnnnnnnnnnnnnnnnnnnnnnnnnnnnnnnnnnnnnnnnnnnnnnnnnnnnnnnnnnnnnnnnnnnnnnnnnnnnnnnnnnnnnnnnnnnnnnnnnnnnnnnnnnnnnnnnnnnnnnnnnnnnnnnnnnnnnnnnnnnnnnnnnnnnnnnnnnnnnnnnnnnnnnnnnnnnnnnnnnnnnnnnnnnnnnnnnnnnnnnnnnnnnnnnnnnnnnnnnnnnnnnnnnnnnnnnnnnnnnnnnnnnnnnnnnnnnnnnnnnnnnnnnnnnnnnnnnnnnnnnnnnnnnnnnnnnnnnnnnnnnnnnnnnnnnnnnnnnnnnnnnnnnnnnnnnnnnnnnnnnnnnnnnnnnnnnnnnnnnnnnnnnnnnnnnnnnnnnnnnnnnnnnnnnnnnnnnnnnnnnnnnnnnnnnnnnnnnnnnnnnnnnnnnnnnnnnnnnnnnnnnnnnnnnnnnnnnnnnnnnnnnnnnnnnnnnnnnnnnnnnnnnnnnnnnnnnnnnnnnnnnnnnnnnnnnnnnnnnnnnnnnnnnnnnnnnnnnnnnnnnnnnnnnnnnnnnnnnnnnnnnnnnnnnnnnnnnnnnnnnnnnnnnnnnnnnnnnnnnnnnnnnnnnnnnnnnnnnnnnnnnnnnnnnnnnnnnnnnnnnnnnnnnnnnnnnnnnnnnnnnnnnnnnnnnnnnnnnnnnnnnnnnnnnnnnnnnnnnnnnnnnnnnnnnnnnnnnnnnnnnnnnnnnnnnnnnnnnnnnnnnnnnnnnnnnnnnnnnnnnnnnnnnnnnnnnnnnnnnnnnnnnnnnnnnnnnnnnnnnnnnnnnnnnnnnnnnnnnnnnnnnnnnnnnnnnnnnnnnnnnnnnnnnnnnnnnnnnnnnnnnnnnnnnnnnnnnnnnnnnnnnnnnnnnnnnnnnnnnnnnnnnnnnnnnnnnnnnnnnnnnnnnnnnnnnnnnnnnnnnnnnnnnnnnnnnnnnnnnnnnnnnnnnnnnnnnnnnnnnnnnnnnnnnnnnnnnnnnnnnnnnnnnnnnnnnnnnnnnnnnnnnnnnnnnnnnnnnnnnnnnnnnnnnnnnnnnnnnnnnnnnnnnnnnnnnnnnnnnnnnnnnnnnnnnnnnnnnnnnnnnnnnnnnnnnnnnnnnnnnnnnnnnnnnnnnnnnnnnnnnnnnnnnnnnnnnnnnnnnnnnnnnnnnnnnnnnnnnnnnnnnnnnnnnnnnnnnnnnnnnnnnnnnnnnnnnnnnnnnnnnnnnnnnnnnnnnnnnnnnnnnnnnnnnnnnnnnnnnnnnnnnnnnnnnnnnnnnnnnnnnnnnnnnnnnnnnnnnnnnnnnnnnnnnnnnnnnnnnnnnnnnnnnnnnnnnnnnnnnnnnnnnnnnnnnnnnnnnnnnnnnnnnnnnnnnnnnnnnnnnnnnnnnnnnnnnnnnnnnnnnnnnnnnnnnnnnnnnnnnnnnnnnnnnnnnnnnnnnnnnnnnnnnnnnnnnnnnnnnnnnnnnnnnnnnnnnnnnnnnnnnnnnnnnnnnnnnnnnnnnnnnnnnnnnnnnnnnnnnnnnnnnnnnnnnnnnnnnnnnnnnnnnnnnnnnnnnnnnnnnnnnnnnnnnnnnnnnnnnnnnnnnnnnnnnnnnnnnnnnnnnnnnnnnnnnnnnnnnnnnnnnnnnnnnnnnnnnnnnnnnnnnnnnnnnnnnnnnnnnnnnnnnnnnnnnnnnnnnnnnnnnnnnnnnnnnnnnnnnnnnnnnnnnnnnnnnnnnnnnnnnnnnnnnnnnnnnnnnnnnnnnnnnnnnnnnnnnnnnnnnnnnnnnnnnnnnnnnnnnnnnnnnnnnnnnnnnnnnnnnnnnnnnnnnnnnnnnnnnnnnnnnnnnnnnnnnnnnnnnnnnnnnnnnnnnnnnnnnnnnnnnnnnnnnnnnnnnnnnnnnnnnnnnnnnnnnnnnnnnnnnnnnnnnnnnnnnnnnnnnnnnnnnnnnnnnnnnnnnnnnnnnnnnnnnnnnnnnnnnnnnnnnnnnnnnnnnnnnnnnnnnnnnnnnnnnnnnnnnnnnnnnnnnnnnnnnnnnnnnnnnnnnnnnnnnnnnnnnnnnnnnnnnnnnnnnnnnnnnnnnnnnnnnnnnnnnnnnnnnnnnnnnnnnnnnnnnnnnnnnnnnnnnnnnnnnnnnnnnnnnnnnnnnnnnnnnnnnnnnnnnnnnnnnnnnnnnnnnnnnnnnnnnnnnnnnnnnnnnnnnnnnnnnnnnnnnnnnnnnnnnnnnnnnnnnnnnnnnnnnnnnnnnnnnnnnnnnnnnnnnnnnnnnnnnnnnnnnnnnnnnnnnnnnnnnnnnnnnnnnnnnnnnnnnnnnnnnnnnnnnnnnnnnnnnnnnnnnnnnnnnnnnnnnnnnnnnnnnnnnnnnnnnnnnnnnnnnnnnnnnnnnnnnnnnnnnnnnnnnnnnnnnnnnnnnnnnnnnnnnnnnnnnnnnnnnnnnnnnnnnnnnnnnnnnnnnnnnnnnnnnnnnnnnnnnnnnnnnnnnnnnnnnnnnnnnnnnnnnnnnnnnnnnnnnnnnnnnnnnnnnnnnnnnnnnnnnnnnnnnnnnnnnnnnnnnnnnnnnnnnnnnnnnnnnnnnnnnnnnnnnnnnnnnnnnnnnnnnnnnnnnnnnnnnnnnnnnnnnnnnnnnnnnnnnnnnnnnnnnnnnnnnnnnnnnnnnnnnnnnnnnnnnnnnnnnnnnnnnnnnnnnnnnnnnnnnnnnnnnnnnnnnnnnnnnnnnnnnnnnnnnnnnnnnnnnnnnnnnnnnnnnnnnnnnnnnnnnnnnnnnnnnnnnnnnnnnnnnnnnnnnnnnnnnnnnnnnnnnnnnnnnnnnnnnnnnnnnnnnnnnnnnnnnnnnnnnnnnnnnnnnnnnnnnnnnnnnnnnnnnnnnnnnnnnnnnnnnnnnnnnnnnnnnnnnnnnnnnnnnnnnnnnnnnnnnnnnnnnnnnnnnnnnnnnnnnnnnnnnnnnnnnnnnnnnnnnnnnnnnnnnnnnnnnnnnnnnnnnnnnnnnnnnnnnnnnnnnnnnnnnnnnnnnnnnnnnnnnnnnnnnnnnnnnnnnnnnnnnnnnnnnnnnnnnnnnnnnnnnnnnnnnnnnnnnnnnnnnnnnnnnnnnnnnnnnnnnnnnnnnnnnnnnnnnnnnnnnnnnnnnnnnnnnnnnnnnnnnnnnnnnnnnnnnnnnnnnnnnnnnnnnnnnnnnnnnnnnnnnnnnnnnnnnnnnnnnnnnnnnnnnnnnnnnnnnnnnnnnnnnnnnnnnnnnnnnnnnnnnnnnnnnnnnnnnnnnnnnnnnnnnnnnnnnnnnnnnnnnnnnnnnnnnnnnnnnnnnnnnnnnnnnnnnnnnnnnnnnnnnnnnnnnnnnnnnnnnnnnnnnnnnnnnnnnnnnnnnnnnnnnnnnnnnnnnnnnnnnnnnnnnnnnnnnnnnnnnnnnnnnnnnnnnnnnnnnnnnnnnnnnnnnnnnnnnnnnnnnnnnnnnnnnnnnnnnnnnnnnnnnnnnnnnnnnnnnnnnnnnnnnnnnnnnnnnnnnnnnnnnnnnnnnnnnnnnnnnnnnnnnnnnnnnnnnnnnnnnnnnnnnnnnnnnnnnnnnnnnnnnnnnnnnnnnnnnnnnnnnnnnnnnnnnnnnnnnnnnnnnnnnnnnnnnnnnnnnnnnnnnnnnnnnnnnnnnnnnnnnnnnnnnnnnnnnnnnnnnnnnnnnnnnnnnnnnnnnnnnnnnnnnnnnnnnnnnnnnnnnnnnnnnnnnnnnnnnnnnnnnnnnnnnnnnnnnnnnnnnnnnnnnnnnnnnnnnnnnnnnnnnnnnnnnnnnnnnnnnnnnnnnnnnnnnnnnnnnnnnnnnnnnnnnnnnnnnnnnnnnnnnnnnnnnnnnnnnnnnnnnnnnnnnnnnnnnnnnnnnnnnnnnnnnnnnnnnnnnnnnnnnnnnnnnnnnnnnnnnnnnnnnnnnnnnnnnnnnnnnnnnnnnnnnnnnnnnnnnnnnnnnnnnnnnnnnnnnnnnnnnnnnnnnnnnnnnnnnnnnnnnnnnnnnnnnnnnnnnnnnnnnnnnnnnnnnnnnnnnnnnnnnnnnnnnnnnnnnnnnnnnnnnnnnnnnnnnnnnnnnnnnnnnnnnnnnnnnnnnnnnnnnnnnnnnnnnnnnnnnnnnnnnnnnnnnnnnnnnnnnnnnnnnnnnnnnnnnnnnnnnnnnnnnnnnnnnnnnnnnnnnnnnnnnnnnnnnnnnnnnnnnnnnnnnnnnnnnnnnnnnnnnnnnnnnnnnnnnnnnnnnnnnnnnnnnnnnnnnnnnnnnnnnnnnnnnnnnnnnnnnnnnnnnnnnnnnnnnnnnnnnnnnnnnnnnnnnnnnnnnnnnnnnnnnnnnnnnnnnnnnnnnnnnnnnnnnnnnnnnnnnnnnnnnnnnnnnnnnnnnnnnnnnnnnnnnnnnnnnnnnnnnnnnnnnnnnnnnnnnnnnnnnnnnnnnnnnnnnnnnnnnnnnnnnnnnnnnnnnnnnnnnnnnnnnnnnnnnnnnnnnnnnnnnnnnnnnnnnnnnnnnnnnnnnnnnnnnnnnnnnnnnnnnnnnnnnnnnnnnnnnnnnnnnnnnnnnnnnnnnnnnnnnnnnnnnnnnnnnnnnnnnnnnnnnnnnnnnnnnnnnnnnnnnnnnnnnnnnnnnnnnnnnnnnnnnnnnnnnnnnnnnnnnnnnnnnnnnnnnnnnnnnnnnnnnnnnnnnnnnnnnnnnnnnnnnnnnnnnnnnnnnnnnnnnnnnnnnnnnnnnnnnnnnnnnnnnnnnnnnnnnnnnnnnnnnnnnnnnnnnnnnnnnnnnnnnnnnnnnnnnnnnnnnnnnnnnnnnnnnnnnnnnnnnnnnnnnnnnnnnnnnnnnnnnnnnnnnnnnnnnnnnnnnnnnnnnnnnnnnnnnnnnnnnnnnnnnnnnnnnnnnnnnnnnnnnnnnnnnnnnnnnnnnnnnnnnnnnnnnnnnnnnnnnnnnnnnnnnnnnnnnnnnnnnnnnnnnnnnnnnnnnnnnnnnnnnnnnnnnnnnnnnnnnnnnnnnnnnnnnnnnnnnnnnnnnnnnnnnnnnnnnnnnnnnnnnnnnnnnnnnnnnnnnnnnnnnnnnnnnnnnnnnnnnnnnnnnnnnnnnnnnnnnnnnnnnnnnnnnnnnnnnnnnnnnnnnnnnnnnnnnnnnnnnnnnnnnnnnnnnnnnnnnnnnnnnnnnnnnnnnnnnnnnnnnnnnnnnnnnnnnnnnnnnnnnnnnnnnnnnnnnnnnnnnnnnnnnnnnnnnnnnnnnnnnnnnnnnnnnnnnnnnnnnnnnnnnnnnnnnnnnnnnnnnnnnnnnnnnnnnnnnnnnnnnnnnnnnnnnnnnnnnnnnnnnnnnnnnnnnnnnnnnnnnnnnnnnnnnnnnnnnnnnnnnnnnnnnnnnnnnnnnnnnnnnnnnnnnnnnnnnnnnnnnnnnnnnnnnnnnnnnnnnnnnnnnnnnnnnnnnnnnnnnnnnnnnnnnnnnnnnnnnnnnnnnnnnnnnnnnnnnnnnnnnnnnnnnnnnnnnnnnnnnnnnnnnnnnnnnnnnnnnnnnnnnnnnnnnnnnnnnnnnnnnnnnnnnnnnnnnnnnnnnnnnnnnnnnnnnnnnnnnnnnnnnnnnnnnnnnnnnnnnnnnnnnnnnnnnnnnnnnnnnnnnnnnnnnnnnnnnnnnnnnnnnnnnnnnnnnnnnnnnnnnnnnnnnnnnnnnnnnnnnnnnnnnnnnnnnnnnnnnnnnnnnnnnnnnnnnnnnnnnnnnnnnnnnnnnnnnnnnnnnnnnnnnnnnnnnnnnnnnnnnnnnnnnnnnnnnnnnnnnnnnnnnnnnnnnnnnnnnnnnnnnnnnnnnnnnnnnnnnnnnnnnnnnnnnnnnnnnnnnnnnnnnnnnnnnnnnnnnnnnnnnnnnnnnnnnnnnnnnnnnnnnnnnnnnnnnnnnnnnnnnnnnnnnnnnnnnnnnnnnnnnnnnnnnnnnnnnnnnnnnnnnnnnnnnnnnnnnnnnnnnnnnnnnnnnnnnnnnnnnnnnnnnnnnnnnnnnnnnnnnnnnnnnnnnnnnnnnnnnnnnnnnnnnnnnnnnnnnnnnnnnnnnnnnnnnnnnnnnnnnnnnnnnnnnnnnnnnnnnnnnnnnnnnnnnnnnnnnnnnnnnnnnnnnnnnnnnnnnnnnnnnnnnnnnnnnnnnnnnnnnnnnnnnnnnnnnnnnnnnnnnnnnnnnnnnnnnnnnnnnnnnnnnnnnnnnnnnnnnnnnnnnnnnnnnnnnnnnnnnnnnnnnnnnnnnnnnnnnnnnnnnnnnnnnnnnnnnnnnnnnnnnnnnnnnnnnnnnnnnnnnnnnnnnnnnnnnnnnnnnnnnnnnnnnnnnnnnnnnnnnnnnnnnnnnnnnnnnnnnnnnnnnnnnnnnnnnnnnnnnnnnnnnnnnnnnnnnnnnnnnnnnnnnnnnnnnnnnnnnnnnnnnnnnnnnnnnnnnnnnnnnnnnnnnnnnnnnnnnnnnnnnnnnnnnnnnnnnnnnnnnnnnnnnnnnnnnnnnnnnnnnnnnnnnnnnnnnnnnnnnnnnnnnnnnnnnnnnnnnnnnnnnnnnnnnnnnnnnnnnnnnnnnnnnnnnnnnnnnnnnnnnnnnnnnnnnnnnnnnnnnnnnnnnnnnnnnnnnnnnnnnnnnnnnnnnnnnnnnnnnnnnnnnnnnnnnnnnnnnnnnnnnnnnnnnnnnnnnnnnnnnnnnnnnnnnnnnnnnnnnnnnnnnnnnnnnnnnnnnnnnnnnnnnnnnnnnnnnnnnnnnnnnnnnnnnnnnnnnnnnnnnnnnnnnnnnnnnnnnnnnnnnnnnnnnnnnnnnnnnnnnnnnnnnnnnnnnnnnnnnnnnnnnnnnnnnnnnnnnnnnnnnnnnnnnnnnnnnnnnnnnnnnnnnnnnnnnnnnnnnnnnnnnnnnnnnnnnnnnnnnnnnnnnnnnnnnnnnnnnnnnnnnnnnnnnnnnnnnnnnnnnnnnnnnnnnnnnnnnnnnnnnnnnnnnnnnnnnnnnnnnnnnnnnnnnnnnnnnnnnnnnnnnnnnnnnnnnnnnnnnnnnnnnnnnnnnnnnnnnnnnnnnnnnnnnnnnnnnnnnnnnnnnnnnnnnnnnnnnnnnnnnnnnnnnnnnnnnnnnnnnnnnnnnnnnnnnnnnnnnnnnnnnnnnnnnnnnnnnnnnnnnnnnnnnnnnnnnnnnnnnnnnnnnnnnnnnnnnnnnnnnnnnnnnnnnnnnnnnnnnnnnnnnnnnnnnnnnnnnnnnnnnnnnnnnnnnnnnnnnnnnnnnnnnnnnnnnnnnnnnnnnnnnnnnnnnnnnnnnnnnnnnnnnnnnnnnnnnnnnnnnnnnnnnnnnnnnnnnnnnnnnnnnnnnnnnnnnnnnnnnnnnnnnnnnnnnnnnnnnnnnnnnnnnnnnnnnnnnnnnnnnnnnnnnnnnnnnnnnnnnnnnnnnnnnnnnnnnnnnnnnnnnnnnnnnnnnnnnnnnnnnnnnnnnnnnnnnnnnnnnnnnnnnnnnnnnnnnnnnnnnnnnnnnnnnnnnnnnnnnnnnnnnnnnnnnnnnnnnnnnnnnnnnnnnnnnnnnnnnnnnnnnnnnnnnnnnnnnnnnnnnnnnnnnnnnnnnnnnnnnnnnnnnnnnnnnnnnnnnnnnnnnnnnnnnnnnnnnnnnnnnnnnnnnnnnnnnnnnnnnnnnnnnnnnnnnnnnnnnnnnnnnnnnnnnnnnnnnnnnnnnnnnnnnnnnnnnnnnnnnnnnnnnnnnnnnnnnnnnnnnnnnnnnnnnnnnnnnnnnnnnnnnnnnnnnnnnnnnnnnnnnnnnnnnnnnnnnnnnnnnnnnnnnnnnnnnnnnnnnnnnnnnnnnnnnnnnnnnnnnnnnnnnnnnnnnnnnnnnnnnnnnnnnnnnnnnnnnnnnnnnnnnnnnnnnnnnnnnnnnnnnnnnnnnnnnnnnnnnnnnnnnnnnnnnnnnnnnnnnnnnnnnnnnnnnnnnnnnnnnnnnnnnnnnnnnnnnnnnnnnnnnnnnnnnnnnnnnnnnnnnnnnnnnnnnnnnnnnnnnnnnnnnnnnnnnnnnnnnnnnnnnnnnnnnnnnnnnnnnnnnnnnnnnnnnnnnnnnnnnnnnnnnnnnnnnnnnnnnnnnnnnnnnnnnnnnnnnnnnnnnnnnnnnnnnnnnnnnnnnnnnnnnnnnnnnnnnnnnnnnnnnnnnnnnnnnnnnnnnnnnnnnnnnnnnnnnnnnnnnnnnnnnnnnnnnnnnnnnnnnnnnnnnnnnnnnnnnnnnnnnnnnnnnnnnnnnnnnnnnnnnnnnnnnnnnnnnnnnnnnnnnnnnnnnnnnnnnnnnnnnnnnnnnnnnnnnnnnnnnnnnnnnnnnnnnnnnnnnnnnnnnnnnnnnnnnnnnnnnnnnnnnnnnnnnnnnnnnnnnnnnnnnnnnnnnnnnnnnnnnnnnnnnnnnnnnnnnnnnnnnnnnnnnnnnnnnnnnnnnnnnnnnnnnnnnnnnnnnnnnnnnnnnnnnnnnnnnnnnnnnnnnnnnnnnnnnnnnnnnnnnnnnnnnnnnnnnnnnnnnnnnnnnnnnnnnnnnnnnnnnnnnnnnnnnnnnnnnnnnnnnnnnnnnnnnnnnnnnnnnnnnnnnnnnnnnnnnnnnnnnnnnnnnnnnnnnnnnnnnnnnnnnnnnnnnnnnnnnnnnnnnnnnnnnnnnnnnnnnnnnnnnnnnnnnnnnnnnnnnnnnnnnnnnnnnnnnnnnnnnnnnnnnnnnnnnnnnnnnnnnnnnnnnnnnnnnnnnnnnnnnnnnnnnnnnnnnnnnnnnnnnnnnnnnnnnnnnnnnnnnnnnnnnnnnnnnnnnnnnnnnnnnnnnnnnnnnnnnnnnnnnnnnnnnnnnnnnnnnnnnnnnnnnnnnnnnnnnnnnnnnnnnnnnnnnnnnnnnnnnnnnnnnnnnnnnnnnnnnnnnnnnnnnnnnnnnnnnnnnnnnnnnnnnnnnnnnnnnnnnnnnnnnnnnnnnnnnnnnnnnnnnnnnnnnnnnnnnnnnnnnnnnnnnnnnnnnnnnnnnnnnnnnnnnnnnnnnnnnnnnnnnnnnnnnnnnnnnnnnnnnnnnnnnnnnnnnnnnnnnnnnnnnnnnnnnnnnnnnnnnnnnnnnnnnnnnnnnnnnnnnnnnnnnnnnnnnnnnnnnnnnnnnnnnnnnnnnnnnnnnnnnnnnnnnnnnnnnnnnnnnnnnnnnnnnnnnnnnnnnnnnnnnnnnnnnnnnnnnnnnnnnnnnnnnnnnnnnnnnnnnnnnnnnnnnnnnnnnnnnnnnnnnnnnnnnnnnnnnnnnnnnnnnnnnnnnnnnnnnnnnnnnnnnnnnnnnnnnnnnnnnnnnnnnnnnnnnnnnnnnnnnnnnnnnnnnnnnnnnnnnnnnnnnnnnnnnnnnnnnnnnnnnnnnnnnnnnnnnnnnnnnnnnnnnnnnnnnnnnnnnnnnnnnnnnnnnnnnnnnnnnnnnnnnnnnnnnnnnnnnnnnnnnnnnnnnnnnnnnnnnnnnnnnnnnnnnnnnnnnnnnnnnnnnnnnnnnnnnnnnnnnnnnnnnnnnnnnnnnnnnnnnnnnnnnnnnnnnnnnnnnnnnnnnnnnnnnnnnnnnnnnnnnnnnnnnnnnnnnnnnnnnnnnnnnnnnnnnnnnnnnnnnnnnnnnnnnnnnnnnnnnnnnnnnnnnnnnnnnnnnnnnnnnnnnnnnnnnnnnnnnnnnnnnnnnnnnnnnnnnnnnnnnnnnnnnnnnnnnnnnnnnnnnnnnnnnnnnnnnnnnnnnnnnnnnnnnnnnnnnnnnnnnnnnnnnnnnnnnnnnnnnnnnnnnnnnnnnnnnnnnnnnnnnnnnnnnnnnnnnnnnnnnnnnnnnnnnnnnnnnnnnnnnnnnnnnnnnnnnnnnnnnnnnnnnnnnnnnnnnnnnnnnnnnnnnnnnnnnnnnnnnnnnnnnnnnnnnnnnnnnnnnnnnnnnnnnnnnnnnnnnnnnnnnnnnnnnnnnnnnnnnnnnnnnnnnnnnnnnnnnnnnnnnnnnnnnnnnnnnnnnnnnnnnnnnnnnnnnnnnnnnnnnnnnnnnnnnnnnnnnnnnnnnnnnnnnnnnnnnnnnnnnnnnnnnnnnnnnnnnnnnnnnnnnnnnnnnnnnnnnnnnnnnnnnnnnnnnnnnnnnnnnnnnnnnnnnnnnnnnnnnnnnnnnnnnnnnnnnnnnnnnnnnnnnnnnnnnnnnnnnnnnnnnnnnnnnnnnnnnnnnnnnnnnnnnnnnnnnnnnnnnnnnnnnnnnnnnnnnnnnnnnnnnnnnnnnnnnnnnnnnnnnnnnnnnnnnnnnnnnnnnnnnnnnnnnnnnnnnnnnnnnnnnnnnnnnnnnnnnnnnnnnnnnnnnnnnnnnnnnnnnnnnnnnnnnnnnnnnnnnnnnnnnnnnnnnnnnnnnnnnnnnnnnnnnnnnnnnnnnnnnnnnnnnnnnnnnnnnnnnnnnnnnnnnnnnnnnnnnnnnnnnnnnnnnnnnnnnnnnnnnnnnnnnnnnnnnnnnnnnnnnnnnnnnnnnnnnnnnnnnnnnnnnnnnnnnnnnnnnnnnnnnnnnnnnnnnnnnnnnnnnnnnnnnnnnnnnnnnnnnnnnnnnnnnnnnnnnnnnnnnnnnnnnnnnnnnnnnnnnnnnnnnnnnnnnnnnnnnnnnnnnnnnnnnnnnnnnnnnnnnnnnnnnnnnnnnnnnnnnnnnnnnnnnnnnnnnnnnnnnnnnnnnnnnnnnnnnnnnnnnnnnnnnnnnnnnnnnnnnnnnnnnnnnnnnnnnnnnnnnnnnnnnnnnnnnnnnnnnnnnnnnnnnnnnnnnnnnnnnnnnnnnnnnnnnnnnnnnnnnnnnnnnnnnnnnnnnnnnnnnnnnnnnnnnnnnnnnnnnnnnnnnnnnnnnnnnnnnnnnnnnnnnnnnnnnnnnnnnnnnnnnnnnnnnnnnnnnnnnnnnnnnnnnnnnnnnnnnnnnnnnnnnnnnnnnnnnnnnnnnnnnnnnnnnnnnnnnnnnnnnnnnnnnnnnnnnnnnnnnnnnnnnnnnnnnnnnnnnnnnnnnnnnnnnnnnnnnnnnnnnnnnnnnnnnnnnnnnnnnnnnnnnnnnnnnnnnnnnnnnnnnnnnnnnnnnnnnnnnnnnnnnnnnnnnnnnnnnnnnnnnnnnnnnnnnnnnnnnnnnnnnnnnnnnnnnnnnnnnnnnnnnnnnnnnnnnnnnnnnnnnnnnnnnnnnnnnnnnnnnnnnnnnnnnnnnnnnnnnnnnnnnnnnnnnnnnnnnnnnnnnnnnnnnnnnnnnnnnnnnnnnnnnnnnnnnnnnnnnnnnnnnnnnnnnnnnnnnnnnnnnnnnnnnnnnnnnnnnnnnnnnnnnnnnnnnnnnnnnnnnnnnnnnnnnnnnnnnnnnnnnnnnnnnnnnnnnnnnnnnnnnnnnnnnnnnnnnnnnnnnnnnnnnnnnnnnnnnnnnnnnnnnnnnnnnnnnnnnnnnnnnnnnnnnnnnnnnnnnnnnnnnnnnnnnnnnnnnnnnnnnnnnnnnnnnnnnnnnnnnnnnnnnnnnnnnnnnnnnnnnnnnnnnnnnnnnnnnnnnnnnnnnnnnnnnnnnnnnnnnnnnnnnnnnnnnnnnnnnnnnnnnnnnnnnnnnnnnnnnnnnnnnnnnnnnnnnnnnnnnnnnnnnnnnnnnnnnnnnnnnnnnnnnnnnnnnnnnnnnnnnnnnnnnnnnnnnnnnnnnnnnnnnnnnnnnnnnnnnnnnnnnnnnnnnnnnnnnnnnnnnnnnnnnnnnnnnnnnnnnnnnnnnnnnnnnnnnnnnnnnnnnnnnnnnnnnnnnnnnnnnnnnnnnnnnnnnnnnnnnnnnnnnnnnnnnnnnnnnnnnnnnnnnnnnnnnnnnnnnnnnnnnnnnnnnnnnnnnnnnnnnnnnnnnnnnnnnnnnnnnnnnnnnnnnnnnnnnnnnnnnnnnnnnnnnnnnnnnnnnnnnnnnnnnnnnnnnnnnnnnnnnnnnnnnnnnnnnnnnnnnnnnnnnnnnnnnnnnnnnnnnnnnnnnnnnnnnnnnnnnnnnnnnnnnnnnnnnnnnnnnnnnnnnnnnnnnnnnnnnnnnnnnnnnnnnnnnnnnnnnnnnnnnnnnnnnnnnnnnnnnnnnnnnnnnnnnnnnnnnnnnnnnnnnnnnnnnnnnnnnnnnnnnnnnnnnnnnnnnnnnnnnnnnnnnnnnnnnnnnnnnnnnnnnnnnnnnnnnnnnnnnnnnnnnnnnnnnnnnnnnnnnnnnnnnnnnnnnnnnnnnnnnnnnnnnnnnnnnnnnnnnnnnnnnnnnnnnnnnnnnnnnnnnnnnnnnnnnnnnnnnnnnnnnnnnnnnnnnnnnnnnnnnnnnnnnnnnnnnnnnnnnnnnnnnnnnnnnnnnnnnnnnnnnnnnnnnnnnnnnnnnnnnnnnnnnnnnnnnnnnnnnnnnnnnnnnnnnnnnnnnnnnnnnnnnnnnnnnnnnnnnnnnnnnnnnnnnnnnnnnnnnnnnnnnnnnnnnnnnnnnnnnnnnnnnnnnnnnnnnnnnnnnnnnnnnnnnnnnnnnnnnnnnnnnnnnnnnnnnnnnnnnnnnnnnnnnnnnnnnnnnnnnnnnnnnnnnnnnnnnnnnnnnnnnnnnnnnnnnnnnnnnnnnnnnnnnnnnnnnnnnnnnnnnnnnnnnnnnnnnnnnnnnnnnnnnnnnnnnnnnnnnnnnnnnnnnnnnnnnnnnnnnnnnnnnnnnnnnnnnnnnnnnnnnnnnnnnnnnnnnnnnnnnnnnnnnnnnnnnnnnnnnnnnnnnnnnnnnnnnnnnnnnnnnnnnnnnnnnnnnnnnnnnnnnnnnnnnnnnnnnnnnnnnnnnnnnnnnnnnnnnnnnnnnnnnnnnnnnnnnnnnnnnnnnnnnnnnnnnnnnnnnnnnnnnnnnnnnnnnnnnnnnnnnnnnnnnnnnnnnnnnnnnnnnnnnnnnnnnnnnnnnnnnnnnnnnnnnnnnnnnnnnnnnnnnnnnnnnnnnnnnnnnnnnnnnnnnnnnnnnnnnnnnnnnnnnnnnnnnnnnnnnnnnnnnnnnnnnnnnnnnnnnnnnnnnnnnnnnnnnnnnnnnnnnnnnnnnnnnnnnnnnnnnnnnnnnnnnnnnnnnnnnnnnnnnnnnnnnnnnnnnnnnnnnnnnnnnnnnnnnnnnnnnnnnnnnnnnnnnnnnnnnnnnnnnnnnnnnnnnnnnnnnnnnnnnnnnnnnnnnnnnnnnnnnnnnnnnnnnnnnnnnnnnnnnnnnnnnnnnnnnnnnnnnnnnnnnnnnnnnnnnnnnnnnnnnnnnnnnnnnnnnnnnnnnnnnnnnnnnnnnnnnnnnnnnnnnnnnnnnnnnnnnnnnnnnnnnnnnnnnnnnnnnnnnnnnnnnnnnnnnnnnnnnnnnnnnnnnnnnnnnnnnnnnnnnnnnnnnnnnnnnnnnnnnnnnnnnnnnnnnnnnnnnnnnnnnnnnnnnnnnnnnnnnnnnnnnnnnnnnnnnnnnnnnnnnnnnnnnnnnnnnnnnnnnnnnnnnnnnnnnnnnnnnnnnnnnnnnnnnnnnnnnnnnnnnnnnnnnnnnnnnnnnnnnnnnnnnnnnnnnnnnnnnnnnnnnnnnnnnnnnnnnnnnnnnnnnnnnnnnnnnnnnnnnnnnnnnnnnnnnnnnnnnnnnnnnnnnnnnnnnnnnnnnnnnnnnnnnnnnnnnnnnnnnnnnnnnnnnnnnnnnnnnnnnnnnnnnnnnnnnnnnnnnnnnnnnnnnnnnnnnnnnnnnnnnnnnnnnnnnnnnnnnnnnnnnnnnnnnnnnnnnnnnnnnnnnnnnnnnnnnnnnnnnnnnnnnnnnnnnnnnnnnnnnnnnnnnnnnnnnnnnnnnnnnnnnnnnnnnnnnnnnnnnnnnnnnnnnnnnnnnnnnnnnnnnnnnnnnnnnnnnnnnnnnnnnnnnnnnnnnnnnnnnnnnnnnnnnnnnnnnnnnnnnnnnnnnnnnnnnnnnnnnnnnnnnnnnnnnnnnnnnnnnnnnnnnnnnnnnnnnnnnnnnnnnnnnnnnnnnnnnnnnnnnnnnnnnnnnnnnnnnnnnnnnnnnnnnnnnnnnnnnnnnnnnnnnnnnnnnnnnnnnnnnnnnnnnnnnnnnnnnnnnnnnnnnnnnnnnnnnnnnnnnnnnnnnnnnnnnnnnnnnnnnnnnnnnnnnnnnnnnnnnnnnnnnnnnnnnnnnnnnnnnnnnnnnnnnnnnnnnnnnnnnnnnnnnnnnnnnnnnnnnnnnnnnnnnnnnnnnnnnnnnnnnnnnnnnnnnnnnnnnnnnnnnnnnnnnnnnnnnnnnnnnnnnnnnnnnnnnnnnnnnnnnnnnnnnnnnnnnnnnnnnnnnnnnnnnnnnnnnnnnnnnnnnnnnnnnnnnnnnnnnnnnnnnnnnnnnnnnnnnnnnnnnnnnnnnnnnnnnnnnnnnnnnnnnnnnnnnnnnnnnnnnnnnnnnnnnnnnnnnnnnnnnnnnnnnnnnnnnnnnnnnnnnnnnnnnnnnnnnnnnnnnnnnnnnnnnnnnnnnnnnnnnnnnnnnnnnnnnnnnnnnnnnnnnnnnnnnnnnnnnnnnnnnnnnnnnnnnnnnnnnnnnnnnnnnnnnnnnnnnnnnnnnnnnnnnnnnnnnnnnnnnnnnnnnnnnnnnnnnnnnnnnnnnnnnnnnnnnnnnnnnnnnnnnnnnnnnnnnnnnnnnnnnnnnnnnnnnnnnnnnnnnnnnnnnnnnnnnnnnnnnnnnnnnnnnnnnnnnnnnnnnnnnnnnnnnnnnnnnnnnnnnnnnnnnnnnnnnnnnnnnnnnnnnnnnnnnnnnnnnnnnnnnnnnnnnnnnnnnnnnnnnnnnnnnnnnnnnnnnnnnnnnnnnnnnnnnnnnnnnnnnnnnnnnnnnnnnnnnnnnnnnnnnnnnnnnnnnnnnnnnnnnnnnnnnnnnnnnnnnnnnnnnnnnnnnnnnnnnnnnnnnnnnnnnnnnnnnnnnnnnnnnnnnnnnnnnnnnnnnnnnnnnnnnnnnnnnnnnnnnnnnnnnnnnnnnnnnnnnnnnnnnnnnnnnnnnnnnnnnnnnnnnnnnnnnnnnnnnnnnnnnnnnnnnnnnnnnnnnnnnnnnnnnnnnnnnnnnnnnnnnnnnnnnnnnnnnnnnnnnnnnnnnnnnnnnnnnnnnnnnnnnnnnnnnnnnnnnnnnnnnnnnnnnnnnnnnnnnnnnnnnnnnnnnnnnnnnnnnnnnnnnnnnnnnnnnnnnnnnnnnnnnnnnnnnnnnnnnnnnnnnnnnnnnnnnnnnnnnnnnnnnnnnnnnnnnnnnnnnnnnnnnnnnnnnnnnnnnnnnnnnnnnnnnnnnnnnnnnnnnnnnnnnnnnnnnnnnnnnnnnnnnnnnnnnnnnnnnnnnnnnnnnnnnnnnnnnnnnnnnnnnnnnnnnnnnnnnnnnnnnnnnnnnnnnnnnnnnnnnnnnnnnnnnnnnnnnnnnnnnnnnnnnnnnnnnnnnnnnnnnnnnnnnnnnnnnnnnnnnnnnnnnnnnnnnnnnnnnnnnnnnnnnnnnnnnnnnnnnnnnnnnnnnnnnnnnnnnnnnnnnnnnnnnnnnnnnnnnnnnnnnnnnnnnnnnnnnnnnnnnnnnnnnnnnnnnnnnnnnnnnnnnnnnnnnnnnnnnnnnnnnnnnnnnnnnnnnnnnnnnnnnnnnnnnnnnnnnnnnnnnnnnnnnnnnnnnnnnnnnnnnnnnnnnnnnnnnnnnnnnnnnnnnnnnnnnnnnnnnnnnnnnnnnnnnnnnnnnnnnnnnnnnnnnnnnnnnnnnnnnnnnnnnnnnnnnnnnnnnnnnnnnnnnnnnnnnnnnnnnnnnnnnnnnnnnnnnnnnnnnnnnnnnnnnnnnnnnnnnnnnnnnnnnnnnnnnnnnnnnnnnnnnnnnnnnnnnnnnnnnnnnnnnnnnnnnnnnnnnnnnnnnnnnnnnnnnnnnnnnnnnnnnnnnnnnnnnnnnnnnnnnnnnnnnnnnnnnnnnnnnnnnnnnnnnnnnnnnnnnnnnnnnnnnnnnnnnnnnnnnnnnnnnnnnnnnnnnnnnnnnnnnnnnnnnnnnnnnnnnnnnnnnnnnnnnnnnnnnnnnnnnnnnnnnnnnnnnnnnnnnnnnnnnnnnnnnnnnnnnnnnnnnnnnnnnnnnnnnnnnnnnnnnnnnnnnnnnnnnnnnnnnnnnnnnnnnnnnnnnnnnnnnnnnnnnnnnnnnnnnnnnnnnnnnnnnnnnnnnnnnnnnnnnnnnnnnnnnnnnnnnnnnnnnnnnnnnnnnnnnnnnnnnnnnnnnnnnnnnnnnnnnnnnnnnnnnnnnnnnnnnnnnnnnnnnnnnnnnnnnnnnnnnnnnnnnnnnnnnnnnnnnnnnnnnnnnnnnnnnnnnnnnnnnnnnnnnnnnnnnnnnnnnnnnnnnnnnnnnnnnnnnnnnnnnnnnnnnnnnnnnnnnnnnnnnnnnnnnnnnnnnnnnnnnnnnnnnnnnnnnnnnnnnnnnnnnnnnnnnnnnnnnnnnnnnnnnnnnnnnnnnnnnnnnnnnnnnnnnnnnnnnnnnnnnnnnnnnnnnnnnnnnnnnnnnnnnnnnnnnnnnnnnnnnnnnnnnnnnnnnnnnnnnnnnnnnnnnnnnnnnnnnnnnnnnnnnnnnnnnnnnnnnnnnnnnnnnnnnnnnnnnnnnnnnnnnnnnnnnnnnnnnnnnnnnnnnnnnnnnnnnnnnnnnnnnnnnnnnnnnnnnnnnnnnnnnnnnnnnnnnnnnnnnnnnnnnnnnnnnnnnnnnnnnnnnnnnnnnnnnnnnnnnnnnnnnnnnnnnnnnnnnnnnnnnnnnnnnnnnnnnnnnnnnnnnnnnnnnnnnnnnnnnnnnnnnnnnnnnnnnnnnnnnnnnnnnnnnnnnnnnnnnnnnnnnnnnnnnnnnnnnnnnnnnnnnnnnnnnnnnnnnnnnnnnnnnnnnnnnnnnnnnnnnnnnnnnnnnnnnnnnnnnnnnnnnnnnnnnnnnnnnnnnnnnnnnnnnnnnnnnnnnnnnnnnnnnnnnnnnnnnnnnnnnnnnnnnnnnnnnnnnnnnnnnnnnnnnnnnnnnnnnnnnnnnnnnnnnnnnnnnnnnnnnnnnnnnnnnnnnnnnnnnnnnnnnnnnnnnnnnnnnnnnnnnnnnnnnnnnnnnnnnnnnnnnnnnnnnnnnnnnnnnnnnnnnnnnnnnnnnnnnnnnnnnnnnnnnnnnnnnnnnnnnnnnnnnnnnnnnnnnnnnnnnnnnnnnnnnnnnnnnnnnnnnnnnnnnnnnnnnnnnnnnnnnnnnnnnnnnnnnnnnnnnnnnnnnnnnnnnnnnnnnnnnnnnnnnnnnnnnnnnnnnnnnnnnnnnnnnnnnnnnnnnnnnnnnnnnnnnnnnnnnnnnnnnnnnnnnnnnnnnnnnnnnnnnnnnnnnnnnnnnnnnnnnnnnnnnnnnnnnnnnnnnnnnnnnnnnnnnnnnnnnnnnnnnnnnnnnnnnnnnnnnnnnnnnnnnnnnnnnnnnnnnnnnnnnnnnnnnnnnnnnnnnnnnnnnnnnnnnnnnnnnnnnnnnnnnnnnnnnnnnnnnnnnnnnnnnnnnnnnnnnnnnnnnnnnnnnnnnnnnnnnnnnnnnnnnnnnnnnnnnnnnnnnnnnnnnnnnnnnnnnnnnnnnnnnnnnnnnnnnnnnnnnnnnnnnnnnnnnnnnnnnnnnnnnnnnnnnnnnnnnnnnnnnnnnnnnnnnnnnnnnnnnnnnnnnnnnnnnnnnnnnnnnnnnnnnnnnnnnnnnnnnnnnnnnnnnnnnnnnnnnnnnnnnnnnnnnnnnnnnnnnnnnnnnnnnnnnnnnnnnnnnnnnnnnnnnnnnnnnnnnnnnnnnnnnnnnnnnnnnnnnnnnnnnnnnnnnnnnnnnnnnnnnnnnnnnnnnnnnnnnnnnnnnnnnnnnnnnnnnnnnnnnnnnnnnnnnnnnnnnnnnnnnnnnnnnnnnnnnnnnnnnnnnnnnnnnnnnnnnnnnnnnnnnnnnnnnnnnnnnnnnnnnnnnnnnnnnnnnnnnnnnnnnnnnnnnnnnnnnnnnnnnnnnnnnnnnnnnnnnnnnnnnnnnnnnnnnnnnnnnnnnnnnnnnnnnnnnnnnnnnnnnnnnnnnnnnnnnnnnnnnnnnnnnnnnnnnnnnnnnnnnnnnnnnnnnnnnnnnnnnnnnnnnnnnnnnnnnnnnnnnnnnnnnnnnnnnnnnnnnnnnnnnnnnnnnnnnnnnnnnnnnnnnnnnnnnnnnnnnnnnnnnnnnnnnnnnnnnnnnnnnnnnnnnnnnnnnnnnnnnnnnnnnnnnnnnnnnnnnnnnnnnnnnnnnnnnnnnnnnnnnnnnnnnnnnnnnnnnnnnnnnnnnnnnnnnnnnnnnnnnnnnnnnnnnnnnnnnnnnnnnnnnnnnnnnnnnnnnnnnnnnnnnnnnnnnnnnnnnnnnnnnnnnnnnnnnnnnnnnnnnnnnnnnnnnnnnnnnnnnnnnnnnnnnnnnnnnnnnnnnnnnnnnnnnnnnnnnnnnnnnnnnnnnnnnnnnnnnnnnnnnnnnnnnnnnnnnnnnnnnnnnnnnnnnnnnnnnnnnnnnnnnnnnnnnnnnnnnnnnnnnnnnnnnnnnnnnnnnnnnnnnnnnnnnnnnnnnnnnnnnnnnnnnnnnnnnnnnnnnnnnnnnnnnnnnnnnnnnnnnnnnnnnnnnnnnnnnnnnnnnnnnnnnnnnnnnnnnnnnnnnnnnnnnnnnnnnnnnnnnnnnnnnnnnnnnnnnnnnnnnnnnnnnnnnnnnnnnnnnnnnnnnnnnnnnnnnnnnnnnnnnnnnnnnnnnnnnnnnnnnnnnnnnnnnnnnnnnnnnnnnnnnnnnnnnnnnnnnnnnnnnnnnnnnnnnnnnnnnnnnnnnnnnnnnnnnnnnnnnnnnnnnnnnnnnnnnnnnnnnnnnnnnnnnnnnnnnnnnnnnnnnnnnnnnnnnnnnnnnnnnnnnnnnnnnnnnnnnnnnnnnnnnnnnnnnnnnnnnnnnnnnnnnnnnnnnnnnnnnnnnnnnnnnnnnnnnnnnnnnnnnnnnnnnnnnnnnnnnnnnnnnnnnnnnnnnnnnnnnnnnnnnnnnnnnnnnnnnnnnnnnnnnnnnnnnnnnnnnnnnnnnnnnnnnnnnnnnnnnnnnnnnnnnnnnnnnnnnnnnnnnnnnnnnnnnnnnnnnnnnnnnnnnnnnnnnnnnnnnnnnnnnnnnnnnnnnnnnnnnnnnnnnnnnnnnnnnnnnnnnnnnnnnnnnnnnnnnnnnnnnnnnnnnnnnnnnnnnnnnnnnnnnnnnnnnnnnnnnnnnnnnnnnnnnnnnnnnnnnnnnnnnnnnnnnnnnnnnnnnnnnnnnnnnnnnnnnnnnnnnnnnnnnnnnnnnnnnnnnnnnnnnnnnnnnnnnnnnnnnnnnnnnnnnnnnnnnnnnnnnnnnnnnnnnnnnnnnnnnnnnnnnnnnnnnnnnnnnnnnnnnnnnnnnnnnnnnnnnnnnnnnnnnnnnnnnnnnnnnnnnnnnnnnnnnnnnnnnnnnnnnnnnnnnnnnnnnnnnnnnnnnnnnnnnnnnnnnnnnnnnnnnnnnnnnnnnnnnnnnnnnnnnnnnnnnnnnnnnnnnnnnnnnnnnnnnnnnnnnnnnnnnnnnnnnnnnnnnnnnnnnnnnnnnnnnnnnnnnnnnnnnnnnnnnnnnnnnnnnnnnnnnnnnnnnnnnnnnnnnnnnnnnnnnnnnnnnnnnnnnnnnnnnnnnnnnnnnnnnnnnnnnnnnnnnnnnnnnnnnnnnnnnnnnnnnnnnnnnnnnnnnnnnnnnnnnnnnnnnnnnnnnnnnnnnnnnnnnnnnnnnnnnnnnnnnnnnnnnnnnnnnnnnnnnnnnnnnnnnnnnnnnnnnnnnnnnnnnnnnnnnnnnnnnnnnnnnnnnnnnnnnnnnnnnnnnnnnnnnnnnnnnnnnnnnnnnnnnnnnnnnnnnnnnnnnnnnnnnnnnnnnnnnnnnnnnnnnnnnnnnnnnnnnnnnnnnnnnnnnnnnnnnnnnnnnnnnnnnnnnnnnnnnnnnnnnnnnnnnnnnnnnnnnnnnnnnnnnnnnnnnnnnnnnnnnnnnnnnnnnnnnnnnnnnnnnnnnnnnnnnnnnnnnnnnnnnnnnnnnnnnnnnnnnnnnnnnnnnnnnnnnnnnnnnnnnnnnnnnnnnnnnnnnnnnnnnnnnnnnnnnnnnnnnnnnnnnnnnnnnnnnnnnnnnnnnnnnnnnnnnnnnnnnnnnnnnnnnnnnnnnnnnnnnnnnnnnnnnnnnnnnnnnnnnnnnnnnnnnnnnnnnnnnnnnnnnnnnnnnnnnnnnnnnnnnnnnnnnnnnnnnnnnnnnnnnnnnnnnnnnnnnnnnnnnnnnnnnnnnnnnnnnnnnnnnnnnnnnnnnnnnnnnnnnnnnnnnnnnnnnnnnnnnnnnnnnnnnnnnnnnnnnnnnnnnnnnnnnnnnnnnnnnnnnnnnnnnnnnnnnnnnnnnnnnnnnnnnnnnnnnnnnnnnnnnnnnnnnnnnnnnnnnnnnnnnnnnnnnnnnnnnnnnnnnnnnnnnnnnnnnnnnnnnnnnnnnnnnnnnnnnnnnnnnnnnnnnnnnnnnnnnnnnnnnnnnnnnnnnnnnnnnnnnnnnnnnnnnnnnnnnnnnnnnnnnnnnnnnnnnnnnnnnnnnnnnnnnnnnnnnnnnnnnnnnnnnnnnnnnnnnnnnnnnnnnnnnnnnnnnnnnnnnnnnnnnnnnnnnnnnnnnnnnnnnnnnnnnnnnnnnnnnnnnnnnnnnnnnnnnnnnnnnnnnnnnnnnnnnnnnnnnnnnnnnnnnnnnnnnnnnnnnnnnnnnnnnnnnnnnnnnnnnnnnnnnnnnnnnnnnnnnnnnnnnnnnnnnnnnnnnnnnnnnnnnnnnnnnnnnnnnnnnnnnnnnnnnnnnnnnnnnnnnnnnnnnnnnnnnnnnnnnnnnnnnnnnnnnnnnnnnnnnnnnnnnnnnnnnnnnnnnnnnnnnnnnnnnnnnnnnnnnnnnnnnnnnnnnnnnnnnnnnnnnnnnnnnnnnnnnnnnnnnnnnnnnnnnnnnnnnnnnnnnnnnnnnnnnnnnnnnnnnnnnnnnnnnnnnnnnnnnnnnnnnnnnnnnnnnnnnnnnnnnnnnnnnnnnnnnnnnnnnnnnnnnnnnnnnnnnnnnnnnnnnnnnnnnnnnnnnnnnnnnnnnnnnnnnnnnnnnnnnnnnnnnnnnnnnnnnnnnnnnnnnnnnnnnnnnnnnnnnnnnnnnnnnnnnnnnnnnnnnnnnnnnnnnnnnnnnnnnnnnnnnnnnnnnnnnnnnnnnnnnnnnnnnnnnnnnnnnnnnnnnnnnnnnnnnnnnnnnnnnnnnnnnnnnnnnnnnnnnnnnnnnnnnnnnnnnnnnnnnnnnnnnnnnnnnnnnnnnnnnnnnnnnnnnnnnnnnnnnnnnnnnnnnnnnnnnnnnnnnnnnnnnnnnnnnnnnnnnnnnnnnnnnnnnnnnnnnnnnnnnnnnnnnnnnnnnnnnnnnnnnnnnnnnnnnnnnnnnnnnnnnnnnnnnnnnnnnnnnnnnnnnnnnnnnnnnnnnnnnnnnnnnnnnnnnnnnnnnnnnnnnnnnnnnnnnnnnnnnnnnnnnnnnnnnnnnnnnnnnnnnnnnnnnnnnnnnnnnnnnnnnnnnnnnnnnnnnnnnnnnnnnnnnnnnnnnnnnnnnnnnnnnnnnnnnnnnnnnnnnnnnnnnnnnnnnnnnnnnnnnnnnnnnnnnnnnnnnnnnnnnnnnnnnnnnnnnnnnnnnnnnnnnnnnnnnnnnnnnnnnnnnnnnnnnnnnnnnnnnnnnnnnnnnnnnnnnnnnnnnnnnnnnnnnnnnnnnnnnnnnnnnnnnnnnnnnnnnnnnnnnnnnnnnnnnnnnnnnnnnnnnnnnnnnnnnnnnnnnnnnnnnnnnnnnnnnnnnnnnnnnnnnnnnnnnnnnnnnnnnnnnnnnnnnnnnnnnnnnnnnnnnnnnnnnnnnnnnnnnnnnnnnnnnnnnnnnnnnnnnnnnnnnnnnnnnnnnnnnnnnnnnnnnnnnnnnnnnnnnnnnnnnnnnnnnnnnnnnnnnnnnnnnnnnnnnnnnnnnnnnnnnnnnnnnnnnnnnnnnnnnnnnnnnnnnnnnnnnnnnnnnnnnnnnnnnnnnnnnnnnnnnnnnnnnnnnnnnnnnnnnnnnnnnnnnnnnnnnnnnnnnnnnnnnnnnnnnnnnnnnnnnnnnnnnnnnnnnnnnnnnnnnnnnnnnnnnnnnnnnnnnnnnnnnnnnnnnnnnnnnnnnnnnnnnnnnnnnnnnnnnnnnnnnnnnnnnnnnnnnnnnnnnnnnnnnnnnnnnnnnnnnnnnnnnnnnnnnnnnnnnnnnnnnnnnnnnnnnnnnnnnnnnnnnnnnnnnnnnnnnnnnnnnnnnnnnnnnnnnnnnnnnnnnnnnnnnnnnnnnnnnnnnnnnnnnnnnnnnnnnnnnnnnnnnnnnnnnnnnnnnnnnnnnnnnnnnnnnnnnnnnnnnnnnnnnnnnnnnnnnnnnnnnnnnnnnnnnnnnnnnnnnnnnnnnnnnnnnnnnnnnnnnnnnnnnnnnnnnnnnnnnnnnnnnnnnnnnnnnnnnnnnnnnnnnnnnnnnnnnnnnnnnnnnnnnnnnnnnnnnnnnnnnnnnnnnnnnnnnnnnnnnnnnnnnnnnnnnnnnnnnnnnnnnnnnnnnnnnnnnnnnnnnnnnnnnnnnnnnnnnnnnnnnnnnnnnnnnnnnnnnnnnnnnnnnnnnnnnnnnnnnnnnnnnnnnnnnnnnnnnnnnnnnnnnnnnnnnnnnnnnnnnnnnnnnnnnnnnnnnnnnnnnnnnnnnnnnnnnnnnnnnnnnnnnnnnnnnnnnnnnnnnnnnnnnnnnnnnnnnnnnnnnnnnnnnnnnnnnnnnnnnnnnnnnnnnnnnnnnnnnnnnnnnnnnnnnnnnnnnnnnnnnnnnnnnnnnnnnnnnnnnnnnnnnnnnnnnnnnnnnnnnnnnnnnnnnnnnnnnnnnnnnnnnnnnnnnnnnnnnnnnnnnnnnnnnnnnnnnnnnnnnnnnnnnnnnnnnnnnnnnnnnnnnnnnnnnnnnnnnnnnnnnnnnnnnnnnnnnnnnnnnnnnnnnnnnnnnnnnnnnnnnnnnnnnnnnnnnnnnnnnnnnnnnnnnnnnnnnnnnnnnnnnnnnnnnnnnnnnnnnnnnnnnnnnnnnnnnnnnnnnnnnnnnnnnnnnnnnnnnnnnnnnnnnnnnnnnnnnnnnnnnnnnnnnnnnnnnnnnnnnnnnnnnnnnnnnnnnnnnnnnnnnnnnnnnnnnnnnnnnnnnnnnnnnnnnnnnnnnnnnnnnnnnnnnnnnnnnnnnnnnnnnnnnnnnnnnnnnnnnnnnnnnnnnnnnnnnnnnnnnnnnnnnnnnnnnnnnnnnnnnnnnnnnnnnnnnnnnnnnnnnnnnnnnnnnnnnnnnnnnnnnnnnnnnnnnnnnnnnnnnnnnnnnnnnnnnnnnnnnnnnnnnnnnnnnnnnnnnnnnnnnnnnnnnnnnnnnnnnnnnnnnnnnnnnnnnnnnnnnnnnnnnnnnnnnnnnnnnnnnnnnnnnnnnnnnnnnnnnnnnnnnnnnnnnnnnnnnnnnnnnnnnnnnnnnnnnnnnnnnnnnnnnnnnnnnnnnnnnnnnnnnnnnnnnnnnnnnnnnnnnnnnnnnnnnnnnnnnnnnnnnnnnnnnnnnnnnnnnnnnnnnnnnnnnnnnnnnnnnnnnnnnnnnnnnnnnnnnnnnnnnnnnnnnnnnnnnnnnnnnnnnnnnnnnnnnnnnnnnnnnnnnnnnnnnnnnnnnnnnnnnnnnnnnnnnnnnnnnnnnnnnnnnnnnnnnnnnnnnnnnnnnnnnnnnnnnnnnnnnnnnnnnnnnnnnnnnnnnnnnnnnnnnnnnnnnnnnnnnnnnnnnnnnnnnnnnnnnnnnnnnnnnnnnnnnnnnnnnnnnnnnnnnnnnnnnnnnnnnnnnnnnnnnnnnnnnnnnnnnnnnnnnnnnnnnnnnnnnnnnnnnnnnnnnnnnnnnnnnnnnnnnnnnnnnnnnnnnnnnnnnnnnnnnnnnnnnnnnnnnnnnnnnnnnnnnnnnnnnnnnnnnnnnnnnnnnnnnnnnnnnnnnnnnnnnnnnnnnnnnnnnnnnnnnnnnnnnnnnnnnnnnnnnnnnnnnnnnnnnnnnnnnnnnnnnnnnnnnnnnnnnnnnnnnnnnnnnnnnnnnnnnnnnnnnnnnnnnnnnnnnnnnnnnnnnnnnnnnnnnnnnnnnnnnnnnnnnnnnnnnnnnnnnnnnnnnnnnnnnnnnnnnnnnnnnnnnnnnnnnnnnnnnnnnnnnnnnnnnnnnnnnnnnnnnnnnnnnnnnnnnnnnnnnnnnnnnnnnnnnnnnnnnnnnnnnnnnnnnnnnnnnnnnnnnnnnnnnnnnnnnnnnnnnnnnnnnnnnnnnnnnnnnnnnnnnnnnnnnnnnnnnnnnnnnnnnnnnnnnnnnnnnnnnnnnnnnnnnnnnnnnnnnnnnnnnnnnnnnnnnnnnnnnnnnnnnnnnnnnnnnnnnnnnnnnnnnnnnnnnnnnnnnnnnnnnnnnnnnnnnnnnnnnnnnnnnnnnnnnnnnnnnnnnnnnnnnnnnnnnnnnnnnnnnnnnnnnnnnnnnnnnnnnnnnnnnnnnnnnnnnnnnnnnnnnnnnnnnnnnnnnnnnnnnnnnnnnnnnnnnnnnnnnnnnnnnnnnnnnnnnnnnnnnnnnnnnnnnnnnnnnnnnnnnnnnnnnnnnnnnnnnnnnnnnnnnnnnnnnnnnnnnnnnnnnnnnnnnnnnnnnnnnnnnnnnnnnnnnnnnnnnnnnnnnnnnnnnnnnnnnnnnnnnnnnnnnnnnnnnnnnnnnnnnnnnnnnnnnnnnnnnnnnnnnnnnnnnnnnnnnnnnnnnnnnnnnnnnnnnnnnnnnnnnnnnnnnnnnnnnnnnnnnnnnnnnnnnnnnnnnnnnnnnnnnnnnnnnnnnnnnnnnnnnnnnnnnnnnnnnnnnnnnnnnnnnnnnnnnnnnnnnnnnnnnnnnnnnnnnnnnnnnnnnnnnnnnnnnnnnnnnnnnnnnnnnnnnnnnnnnnnnnnnnnnnnnnnnnnnnnnnnnnnnnnnnnnnnnnnnnnnnnnnnnnnnnnnnnnnnnnnnnnnnnnnnnnnnnnnnnnnnnnnnnnnnnnnnnnnnnnnnnnnnnnnnnnnnnnnnnnnnnnnnnnnnnnnnnnnnnnnnnnnnnnnnnnnnnnnnnnnnnnnnnnnnnnnnnnnnnnnnnnnnnnnnnnnnnnnnnnnnnnnnnnnnnnnnnnnnnnnnnnnnnnnnnnnnnnnnnnnnnnnnnnnnnnnnnnnnnnnnnnnnnnnnnnnnnnnnnnnnnnnnnnnnnnnnnnnnnnnnnnnnnnnnnnnnnnnnnnnnnnnnnnnnnnnnnnnnnnnnnnnnnnnnnnnnnnnnnnnnnnnnnnnnnnnnnnnnnnnnnnnnnnnnnnnnnnnnnnnnnnnnnnnnnnnnnnnnnnnnnnnnnnnnnnnnnnnnnnnnnnnnnnnnnnnnnnnnnnnnnnnnnnnnnnnnnnnnnnnnnnnnnnnnnnnnnnnnnnnnnnnnnnnnnnnnnnnnnnnnnnnnnnnnnnnnnnnnnnnnnnnnnnnnnnnnnnnnnnnnnnnnnnnnnnnnnnnnnnnnnnnnnnnnnnnnnnnnnnnnnnnnnnnnnnnnnnnnnnnnnnnnnnnnnnnnnnnnnnnnnnnnnnnnnnnnnnnnnnnnnnnnnnnnnnnnnnnnnnnnnnnnnnnnnnnnnnnnnnnnnnnnnnnnnnnnnnnnnnnnnnnnnnnnnnnnnnnnnnnnnnnnnnnnnnnnnnnnnnnnnnnnnnnnnnnnnnnnnnnnnnnnnnnnnnnnnnnnnnnnnnnnnnnnnnnnnnnnnnnnnnnnnnnnnnnnnnnnnnnnnnnnnnnnnnnnnnnnnnnnnnnnnnnnnnnnnnnnnnnnnnnnnnnnnnnnnnnnnnnnnnnnnnnnnnnnnnnnnnnnnnnnnnnnnnnnnnnnnnnnnnnnnnnnnnnnnnnnnnnnnnnnnnnnnnnnnnnnnnnnnnnnnnnnnnnnnnnnnnnnnnnnnnnnnnnnnnnnnnnnnnnnnnnnnnnnnnnnnnnnnnnnnnnnnnnnnnnnnnnnnnnnnnnnnnnnnnnnnnnnnnnnnnnnnnnnnnnnnnnnnnnnnnnnnnnnnnnnnnnnnnnnnnnnnnnnnnnnnnnnnnnnnnnnnnnnnnnnnnnnnnnnnnnnnnnnnnnnnnnnnnnnnnnnnnnnnnnnnnnnnnnnnnnnnnnnnnnnnnnnnnnnnnnnnnnnnnnnnnnnnnnnnnnnnnnnnnnnnnnnnnnnnnnnnnnnnnnnnnnnnnnnnnnnnnnnnnnnnnnnnnnnnnnnnnnnnnnnnnnnnnnnnnnnnnnnnnnnnnnnnnnnnnnnnnnnnnnnnnnnnnnnnnnnnnnnnnnnnnnnnnnnnnnnnnnnnnnnnnnnnnnnnnnnnnnnnnnnnnnnnnnnnnnnnnnnnnnnnnnnnnnnnnnnnnnnnnnnnnnnnnnnnnnnnnnnnnnnnnnnnnnnnnnnnnnnnnnnnnnnnnnnnnnnnnnnnnnnnnnnnnnnnnnnnnnnnnnnnnnnnnnnnnnnnnnnnnnnnnnnnnnnnnnnnnnnnnnnnnnnnnnnnnnnnnnnnnnnnnnnnnnnnnnnnnnnnnnnnnnnnnnnnnnnnnnnnnnnnnnnnnnnnnnnnnnnnnnnnnnnnnnnnnnnnnnnnnnnnnnnnnnnnnnnnnnnnnnnnnnnnnnnnnnnnnnnnnnnnnnnnnnnnnnnnnnnnnnnnnnnnnnnnnnnnnnnnnnnnnnnnnnnnnnnnnnnnnnnnnnnnnnnnnnnnnnnnnnnnnnnnnnnnnnnnnnnnnnnnnnnnnnnnnnnnnnnnnnnnnnnnnnnnnnnnnnnnnnnnnnnnnnnnnnnnnnnnnnnnnnnnnnnnnnnnnnnnnnnnnnnnnnnnnnnnnnnnnnnnnnnnnnnnnnnnnnnnnnnnnnnnnnnnnnnnnnnnnnnnnnnnnnnnnnnnnnnnnnnnnnnnnnnnnnnnnnnnnnnnnnnnnnnnnnnnnnnnnnnnnnnnnnnnnnnnnnnnnnnnnnnnnnnnnnnnnnnnnnnnnnnnnnnnnnnnnnnnnnnnnnnnnnnnnnnnnnnnnnnnnnnnnnnnnnnnnnnnnnnnnnnnnnnnnnnnnnnnnnnnnnnnnnnnnnnnnnnnnnnnnnnnnnnnnnnnnnnnnnnnnnnnnnnnnnnnnnnnnnnnnnnnnnnnnnnnnnnnnnnnnnnnnnnnnnnnnnnnnnnnnnnnnnnnnnnnnnnnnnnnnnnnnnnnnnnnnnnnnnnnnnnnnnnnnnnnnnnnnnnnnnnnnnnnnnnnnnnnnnnnnnnnnnnnnnnnnnnnnnnnnnnnnnnnnnnnnnnnnnnnnnnnnnnnnnnnnnnnnnnnnnnnnnnnnnnnnnnnnnnnnnnnnnnnnnnnnnnnnnnnnnnnnnnnnnnnnnnnnnnnnnnnnnnnnnnnnnnnnnnnnnnnnnnnnnnnnnnnnnnnnnnnnnnnnnnnnnnnnnnnnnnnnnnnnnnnnnnnnnnnnnnnnnnnnnnnnnnnnnnnnnnnnnnnnnnnnnnnnnnnnnnnnnnnnnnnnnnnnnnnnnnnnnnnnnnnnnnnnnnnnnnnnnnnnnnnnnnnnnnnnnnnnnnnnnnnnnnnnnnnnnnnnnnnnnnnnnnnnnnnnnnnnnnnnnnnnnnnnnnnnnnnnnnnnnnnnnnnnnnnnnnnnnnnnnnnnnnnnnnnnnnnnnnnnnnnnnnnnnnnnnnnnnnnnnnnnnnnnnnnnnnnnnnnnnnnnnnnnnnnnnnnnnnnnnnnnnnnnnnnnnnnnnnnnnnnnnnnnnnnnnnnnnnnnnnnnnnnnnnnnnnnnnnnnnnnnnnnnnnnnnnnnnnnnnnnnnnnnnnnnnnnnnnnnnnnnnnnnnnnnnnnnnnnnnnnnnnnnnnnnnnnnnnnnnnnnnnnnnnnnnnnnnnnnnnnnnnnnnnnnnnnnnnnnnnnnnnnnnnnnnnnnnnnnnnnnnnnnnnnnnnnnnnnnnnnnnnnnnnnnnnnnnnnnnnnnnnnnnnnnnnnnnnnnnnnnnnnnnnnnnnnnnnnnnnnnnnnnnnnnnnnnnnnnnnnnnnnnnnnnnnnnnnnnnnnnnnnnnnnnnnnnnnnnnnnnnnnnnnnnnnnnnnnnnnnnnnnnnnnnnnnnnnnnnnnnnnnnnnnnnnnnnnnnnnnnnnnnnnnnnnnnnnnnnnnnnnnnnnnnnnnnnnnnnnnnnnnnnnnnnnnnnnnnnnnnnnnnnnnnnnnnnnnnnnnnnnnnnnnnnnnnnnnnnnnnnnnnnnnnnnnnnnnnnnnnnnnnnnnnnnnnnnnnnnnnnnnnnnnnnnnnnnnnnnnnnnnnnnnnnnnnnnnnnnnnnnnnnnnnnnnnnnnnnnnnnnnnnnnnnnnnnnnnnnnnnnnnnnnnnnnnnnnnnnnnnnnnnnnnnnnnnnnnnnnnnnnnnnnnnnnnnnnnnnnnnnnnnnnnnnnnnnnnnnnnnnnnnnnnnnnnnnnnnnnnnnnnnnnnnnnnnnnnnnnnnnnnnnnnnnnnnnnnnnnnnnnnnnnnnnnnnnnnnnnnnnnnnnnnnnnnnnnnnnnnnnnnnnnnnnnnnnnnnnnnnnnnnnnnnnnnnnnnnnnnnnnnnnnnnnnnnnnnnnnnnnnnnnnnnnnnnnnnnnnnnnnnnnnnnnnnnnnnnnnnnnnnnnnnnnnnnnnnnnnnnnnnnnnnnnnnnnnnnnnnnnnnnnnnnnnnnnnnnnnnnnnnnnnnnnnnnnnnnnnnnnnnnnnnnnnnnnnnnnnnnnnnnnnnnnnnnnnnnnnnnnnnnnnnnnnnnnnnnnnnnnnnnnnnnnnnnnnnnnnnnnnnnnnnnnnnnnnnnnnnnnnnnnnnnnnnnnnnnnnnnnnnnnnnnnnnnnnnnnnnnnnnnnnnnnnnnnnnnnnnnnnnnnnnnnnnnnnnnnnnnnnnnnnnnnnnnnnnnnnnnnnnnnnnnnnnnnnnnnnnnnnnnnnnnnnnnnnnnnnnnnnnnnnnnnnnnnnnnnnnnnnnnnnnnnnnnnnnnnnnnnnnnnnnnnnnnnnnnnnnnnnnnnnnnnnnnnnnnnnnnnnnnnnnnnnnnnnnnnnnnnnnnnnnnnnnnnnnnnnnnnnnnnnnnnnnnnnnnnnnnnnnnnnnnnnnnnnnnnnnnnnnnnnnnnnnnnnnnnnnnnnnnnnnnnnnnnnnnnnnnnnnnnnnnnnnnnnnnnnnnnnnnnnnnnnnnnnnnnnnnnnnnnnnnnnnnnnnnnnnnnnnnnnnnnnnnnnnnnnnnnnnnnnnnnnnnnnnnnnnnnnnnnnnnnnnnnnnnnnnnnnnnnnnnnnnnnnnnnnnnnnnnnnnnnnnnnnnnnnnnnnnnnnnnnnnnnnnnnnnnnnnnnnnnnnnnnnnnnnnnnnnnnnnnnnnnnnnnnnnnnnnnnnnnnnnnnnnnnnnnnnnnnnnnnnnnnnnnnnnnnnnnnnnnnnnnnnnnnnnnnnnnnnnnnnnnnnnnnnnnnnnnnnnnnnnnnnnnnnnnnnnnnnnnnnnnnnnnnnnnnnnnnnnnnnnnnnnnnnnnnnnnnnnnnnnnnnnnnnnnnnnnnnnnnnnnnnnnnnnnnnnnnnnnnnnnnnnnnnnnnnnnnnnnnnnnnnnnnnnnnnnnnnnnnnnnnnnnnnnnnnnnnnnnnnnnnnnnnnnnnnnnnnnnnnnnnnnnnnnnnnnnnnnnnnnnnnnnnnnnnnnnnnnnnnnnnnnnnnnnnnnnnnnnnnnnnnnnnnnnnnnnnnnnnnnnnnnnnnnnnnnnnnnnnnnnnnnnnnnnnnnnnnnnnnnnnnnnnnnnnnnnnnnnnnnnnnnnnnnnnnnnnnnnnnnnnnnnnnnnnnnnnnnnnnnnnnnnnnnnnnnnnnnnnnnnnnnnnnnnnnnnnnnnnnnnnnnnnnnnnnnnnnnnnnnnnnnnnnnnnnnnnnnnnnnnnnnnnnnnnnnnnnnnnnnnnnnnnnnnnnnnnnnnnnnnnnnnnnnnnnnnnnnnnnnnnnnnnnnnnnnnnnnnnnnnnnnnnnnnnnnnnnnnnnnnnnnnnnnnnnnnnnnnnnnnnnnnnnnnnnnnnnnnnnnnnnnnnnnnnnnnnnnnnnnnnnnnnnnnnnnnnnnnnnnnnnnnnnnnnnnnnnnnnnnnnnnnnnnnnnnnnnnnnnnnnnnnnnnnnnnnnnnnnnnnnnnnnnnnnnnnnnnnnnnnnnnnnnnnnnnnnnnnnnnnnnnnnnnnnnnnnnnnnnnnnnnnnnnnnnnnnnnnnnnnnnnnnnnnnnnnnnnnnnnnnnnnnnnnnnnnnnnnnnnnnnnnnnnnnnnnnnnnnnnnnnnnnnnnnnnnnnnnnnnnnnnnnnnnnnnnnnnnnnnnnnnnnnnnnnnnnnnnnnnnnnnnnnnnnnnnnnnnnnnnnnnnnnnnnnnnnnnnnnnnnnnnnnnnnnnnnnnnnnnnnnnnnnnnnnnnnnnnnnnnnnnnnnnnnnnnnnnnnnnnnnnnnnnnnnnnnnnnnnnnnnnnnnnnnnnnnnnnnnnnnnnnnnnnnnnnnnnnnnnnnnnnnnnnnnnnnnnnnnnnnnnnnnnnnnnnnnnnnnnnnnnnnnnnnnnnnnnnnnnnnnnnnnnnnnnnnnnnnnnnnnnnnnnnnnnnnnnnnnnnnnnnnnnnnnnnnnnnnnnnnnnnnnnnnnnnnnnnnnnnnnnnnnnnnnnnnnnnnnnnnnnnnnnnnnnnnnnnnnnnnnnnnnnnnnnnnnnnnnnnnnnnnnnnnnnnnnnnnnnnnnnnnnnnnnnnnnnnnnnnnnnnnnnnnnnnnnnnnnnnnnnnnnnnnnnnnnnnnnnnnnnnnnnnnnnnnnnnnnnnnnnnnnnnnnnnnnnnnnnnnnnnnnnnnnnnnnnnnnnnnnnnnnnnnnnnnnnnnnnnnnnnnnnnnnnnnnnnnnnnnnnnnnnnnnnnnnnnnnnnnnnnnnnnnnnnnnnnnnnnnnnnnnnnnnnnnnnnnnnnnnnnnnnnnnnnnnnnnnnnnnnnnnnnnnnnnnnnnnnnnnnnnnnnnnnnnnnnnnnnnnnnnnnnnnnnnnnnnnnnnnnnnnnnnnnnnnnnnnnnnnnnnnnnnnnnnnnnnnnnnnnnnnnnnnnnnnnnnnnnnnnnnnnnnnnnnnnnnnnnnnnnnnnnnnnnnnnnnnnnnnnnnnnnnnnnnnnnnnnnnnnnnnnnnnnnnnnnnnnnnnnnnnnnnnnnnnnnnnnnnnnnnnnnnnnnnnnnnnnnnnnnnnnnnnnnnnnnnnnnnnnnnnnnnnnnnnnnnnnnnnnnnnnnnnnnnnnnnnnnnnnnnnnnnnnnnnnnnnnnnnnnnnnnnnnnnnnnnnnnnnnnnnnnnnnnnnnnnnnnnnnnnnnnnnnnnnnnnnnnnnnnnnnnnnnnnnnnnnnnnnnnnnnnnnnnnnnnnnnnnnnnnnnnnnnnnnnnnnnnnnnnnnnnnnnnnnnnnnnnnnnnnnnnnnnnnnnnnnnnnnnnnnnnnnnnnnnnnnnnnnnnnnnnnnnnnnnnnnnnnnnnnnnnnnnnnnnnnnnnnnnnnnnnnnnnnnnnnnnnnnnnnnnnnnnnnnnnnnnnnnnnnnnnnnnnnnnnnnnnnnnnnnnnnnnnnnnnnnnnnnnnnnnnnnnnnnnnnnnnnnnnnnnnnnnnnnnnnnnnnnnnnnnnnnnnnnnnnnnnnnnnnnnnnnnnnnnnnnnnnnnnnnnnnnnnnnnnnnnnnnnnnnnnnnnnnnnnnnnnnnnnnnnnnnnnnnnnnnnnnnnnnnnnnnnnnnnnnnnnnnnnnnnnnnnnnnnnnnnnnnnnnnnnnnnnnnnnnnnnnnnnnnnnnnnnnnnnnnnnnnnnnnnnnnnnnnnnnnnnnnnnnnnnnnnnnnnnnnnnnnnnnnnnnnnnnnnnnnnnnnnnnnnnnnnnnnnnnnnnnnnnnnnnnnnnnnnnnnnnnnnnnnnnnnnnnnnnnnnnnnnnnnnnnnnnnnnnnnnnnnnnnnnnnnnnnnnnnnnnnnnnnnnnnnnnnnnnnnnnnnnnnnnnnnnnnnnnnnnnnnnnnnnnnnnnnnnnnnnnnnnnnnnnnnnnnnnnnnnnnnnnnnnnnnnnnnnnnnnnnnnnnnnnnnnnnnnnnnnnnnnnnnnnnnnnnnnnnnnnnnnnnnnnnnnnnnnnnnnnnnnnnnnnnnnnnnnnnnnnnnnnnnnnnnnnnnnnnnnnnnnnnnnnnnnnnnnnnnnnnnnnnnnnnnnnnnnnnnnnnnnnnnnnnnnnnnnnnnnnnnnnnnnnnnnnnnnnnnnnnnnnnnnnnnnnnnnnnnnnnnnnnnnnnnnnnnnnnnnnnnnnnnnnnnnnnnnnnnnnnnnnnnnnnnnnnnnnnnnnnnnnnnnnnnnnnnnnnnnnnnnnnnnnnnnnnnnnnnnnnnnnnnnnnnnnnnnnnnnnnnnnnnnnnnnnnnnnnnnnnnnnnnnnnnnnnnnnnnnnnnnnnnnnnnnnnnnnnnnnnnnnnnnnnnnnnnnnnnnnnnnnnnnnnnnnnnnnnnnnnnnnnnnnnnnnnnnnnnnnnnnnnnnnnnnnnnnnnnnnnnnnnnnnnnnnnnnnnnnnnnnnnnnnnnnnnnnnnnnnnnnnnnnnnnnnnnnnnnnnnnnnnnnnnnnnnnnnnnnnnnnnnnnnnnnnnnnnnnnnnnnnnnnnnnnnnnnnnnnnnnnnnnnnnnnnnnnnnnnnnnnnnnnnnnnnnnnnnnnnnnnnnnnnnnnnnnnnnnnnnnnnnnnnnnnnnnnnnnnnnnnnnnnnnnnnnnnnnnnnnnnnnnnnnnnnnnnnnnnnnnnnnnnnnnnnnnnnnnnnnnnnnnnnnnnnnnnnnnnnnnnnnnnnnnnnnnnnnnnnnnnnnnnnnnnnnnnnnnnnnnnnnnnnnnnnnnnnnnnnnnnnnnnnnnnnnnnnnnnnnnnnnnnnnnnnnnnnnnnnnnnnnnnnnnnnnnnnnnnnnnnnnnnnnnnnnnnnnnnnnnnnnnnnnnnnnnnnnnnnnnnnnnnnnnnnnnnnnnnnnnnnnnnnnnnnnnnnnnnnnnnnnnnnnnnnnnnnnnnnnnnnnnnnnnnnnnnnnnnnnnnnnnnnnnnnnnnnnnnnnnnnnnnnnnnnnnnnnnnnnnnnnnnnnnnnnnnnnnnnnnnnnnnnnnnnnnnnnnnnnnnnnnnnnnnnnnnnnnnnnnnnnnnnnnnnnnnnnnnnnnnnnnnnnnnnnnnnnnnnnnnnnnnnnnnnnnnnnnnnnnnnnnnnnnnnnnnnnnnnnnnnnnnnnnnnnnnnnnnnnnnnnnnnnnnnnnnnnnnnnnnnnnnnnnnnnnnnnnnnnnnnnnnnnnnnnnnnnnnnnnnnnnnnnnnnnnnnnnnnnnnnnnnnnnnnnnnnnnnnnnnnnnnnnnnnnnnnnnnnnnnnnnnnnnnnnnnnnnnnnnnnnnnnnnnnnnnnnnnnnnnnnnnnnnnnnnnnnnnnnnnnnnnnnnnnnnnnnnnnnnnnnnnnnnnnnnnnnnnnnnnnnnnnnnnnnnnnnnnnnnnnnnnnnnnnnnnnnnnnnnnnnnnnnnnnnnnnnnnnnnnnnnnnnnnnnnnnnnnnnnnnnnnnnnnnnnnnnnnnnnnnnnnnnnnnnnnnnnnnnnnnnnnnnnnnnnnnnnnnnnnnnnnnnnnnnnnnnnnnnnnnnnnnnnnnnnnnnnnnnnnnnnnnnnnnnnnnnnnnnnnnnnnnnnnnnnnnnnnnnnnnnnnnnnnnnnnnnnnnnnnnnnnnnnnnnnnnnnnnnnnnnnnnnnnnnnnnnnnnnnnnnnnnnnnnnnnnnnnnnnnnnnnnnnnnnnnnnnnnnnnnnnnnnnnnnnnnnnnnnnnnnnnnnnnnnnnnnnnnnnnnnnnnnnnnnnnnnnnnnnnnnnnnnnnnnnnnnnnnnnnnnnnnnnnnnnnnnnnnnnnnnnnnnnnnnnnnnnnnnnnnnnnnnnnnnnnnnnnnnnnnnnnnnnnnnnnnnnnnnnnnnnnnnnnnnnnnnnnnnnnnnnnnnnnnnnnnnnnnnnnnnnnnnnnnnnnnnnnnnnnnnnnnnnnnnnnnnnnnnnnnnnnnnnnnnnnnnnnnnnnnnnnnnnnnnnnnnnnnnnnnnnnnnnnnnnnnnnnnnnnnnnnnnnnnnnnnnnnnnnnnnnnnnnnnnnnnnnnnnnnnnnnnnnnnnnnnnnnnnnnnnnnnnnnnnnnnnnnnnnnnnnnnnnnnnnnnnnnnnnnnnnnnnnnnnnnnnnnnnnnnnnnnnnnnnnnnnnnnnnnnnnnnnnnnnnnnnnnnnnnnnnnnnnnnnnnnnnnnnnnnnnnnnnnnnnnnnnnnnnnnnnnnnnnnnnnnnnnnnnnnnnnnnnnnnnnnnnnnnnnnnnnnnnnnnnnnnnnnnnnnnnnnnnnnnnnnnnnnnnnnnnnnnnnnnnnnnnnnnnnnnnnnnnnnnnnnnnnnnnnnnnnnnnnnnnnnnnnnnnnnnnnnnnnnnnnnnnnnnnnnnnnnnnnnnnnnnnnnnnnnnnnnnnnnnnnnnnnnnnnnnnnnnnnnnnnnnnnnnnnnnnnnnnnnnnnnnnnnnnnnnnnnnnnnnnnnnnnnnnnnnnnnnnnnnnnnnnnnnnnnnnnnnnnnnnnnnnnnnnnnnnnnnnnnnnnnnnnnnnnnnnnnnnnnnnnnnnnnnnnnnnnnnnnnnnnnnnnnnnnnnnnnnnnnnnnnnnnnnnnnnnnnnnnnnnnnnnnnnnnnnnnnnnnnnnnnnnnnnnnnnnnnnnnnnnnnnnnnnnnnnnnnnnnnnnnnnnnnnnnnnnnnnnnnnnnnnnnnnnnnnnnnnnnnnnnnnnnnnnnnnnnnnnnnnnnnnnnnnnnnnnnnnnnnnnnnnnnnnnnnnnnnnnnnnnnnnnnnnnnnnnnnnnnnnnnnnnnnnnnnnnnnnnnnnnnnnnnnnnnnnnnnnnnnnnnnnnnnnnnnnnnnnnnnnnnnnnnnnnnnnnnnnnnnnnnnnnnnnnnnnnnnnnnnnnnnnnnnnnnnnnnnnnnnnnnnnnnnnnnnnnnnnnnnnnnnnnnnnnnnnnnnnnnnnnnnnnnnnnnnnnnnnnnnnnnnnnnnnnnnnnnnnnnnnnnnnnnnnnnnnnnnnnnnnnnnnnnnnnnnnnnnnnnnnnnnnnnnnnnnnnnnnnnnnnnnnnnnnnnnnnnnnnnnnnnnnnnnnnnnnnnnnnnnnnnnnnnnnnnnnnnnnnnnnnnnnnnnnnnnnnnnnnnnnnnnnnnnnnnnnnnnnnnnnnnnnnnnnnnnnnnnnnnnnnnnnnnnnnnnnnnnnnnnnnnnnnnnnnnnnnnnnnnnnnnnnnnnnnnnnnnnnnnnnnnnnnnnnnnnnnnnnnnnnnnnnnnnnnnnnnnnnnnnnnnnnnnnnnnnnnnnnnnnnnnnnnnnnnnnnnnnnnnnnnnnnnnnnnnnnnnnnnnnnnnnnnnnnnnnnnnnnnnnnnnnnnnnnnnnnnnnnnnnnnnnnnnnnnnnnnnnnnnnnnnnnnnnnnnnnnnnnnnnnnnnnnnnnnnnnnnnnnnnnnnnnnnnnnnnnnnnnnnnnnnnnnnnnnnnnnnnnnnnnnnnnnnnnnnnnnnnnnnnnnnnnnnnnnnnnnnnnnnnnnnnnnnnnnnnnnnnnnnnnnnnnnnnnnnnnnnnnnnnnnnnnnnnnnnnnnnnnnnnnnnnnnnnnnnnnnnnnnnnnnnnnnnnnnnnnnnnnnnnnnnnnnnnnnnnnnnnnnnnnnnnnnnnnnnnnnnnnnnnnnnnnnnnnnnnnnnnnnnnnnnnnnnnnnnnnnnnnnnnnnnnnnnnnnnnnnnnnnnnnnnnnnnnnnnnnnnnnnnnnnnnnnnnnnnnnnnnnnnnnnnnnnnnnnnnnnnnnnnnnnnnnnnnnnnnnnnnnnnnnnnnnnnnnnnnnnnnnnnnnnnnnnnnnnnnnnnnnnnnnnnnnnnnnnnnnnnnnnnnnnnnnnnnnnnnnnnnnnnnnnnnnnnnnnnnnnnnnnnnnnnnnnnnnnnnnnnnnnnnnnnnnnnnnnnnnnnnnnnnnnnnnnnnnnnnnnnnnnnnnnnnnnnnnnnnnnnnnnnnnnnnnnnnnnnnnnnnnnnnnnnnnnnnnnnnnnnnnnnnnnnnnnnnnnnnnnnnnnnnnnnnnnnnnnnnnnnnnnnnnnnnnnnnnnnnnnnnnnnnnnnnnnnnnnnnnnnnnnnnnnnnnnnnnnnnnnnnnnnnnnnnnnnnnnnnnnnnnnnnnnnnnnnnnnnnnnnnnnnnnnnnnnnnnnnnnnnnnnnnnnnnnnnnnnnnnnnnnnnnnnnnnnnnnnnnnnnnnnnnnnnnnnnnnnnnnnnnnnnnnnnnnnnnnnnnnnnnnnnnnnnnnnnnnnnnnnnnnnnnnnnnnnnnnnnnnnnnnnnnnnnnnnnnnnnnnnnnnnnnnnnnnnnnnnnnnnnnnnnnnnnnnnnnnnnnnnnnnnnnnnnnnnnnnnnnnnnnnnnnnnnnnnnnnnnnnnnnnnnnnnnnnnnnnnnnnnnnnnnnnnnnnnnnnnnnnnnnnnnnnnnnnnnnnnnnnnnnnnnnnnnnnnnnnnnnnnnnnnnnnnnnnnnnnnnnnnnnnnnnnnnnnnnnnnnnnnnnnnnnnnnnnnnnnnnnnnnnnnnnnnnnnnnnnnnnnnnnnnnnnnnnnnnnnnnnnnnnnnnnnnnnnnnnnnnnnnnnnnnnnnnnnnnnnnnnnnnnnnnnnnnnnnnnnnnnnnnnnnnnnnnnnnnnnnnnnnnnnnnnnnnnnnnnnnnnnnnnnnnnnnnnnnnnnnnnnnnnnnnnnnnnnnnnnnnnnnnnnnnnnnnnnnnnnnnnnnnnnnnnnnnnnnnnnnnnnnnnnnnnnnnnnnnnnnnnnnnnnnnnnnnnnnnnnnnnnnnnnnnnnnnnnnnnnnnnnnnnnnnnnnnnnnnnnnnnnnnnnnnnnnnnnnnnnnnnnnnnnnnnnnnnnnnnnnnnnnnnnnnnnnnnnnnnnnnnnnnnnnnnnnnnnnnnnnnnnnnnnnnnnnnnnnnnnnnnnnnnnnnnnnnnnnnnnnnnnnnnnnnnnnnnnnnnnnnnnnnnnnnnnnnnnnnnnnnnnnnnnnnnnnnnnnnnnnnnnnnnnnnnnnnnnnnnnnnnnnnnnnnnnnnnnnnnnnnnnnnnnnnnnnnnnnnnnnnnnnnnnnnnnnnnnnnnnnnnnnnnnnnnnnnnnnnnnnnnnnnnnnnnnnnnnnnnnnnnnnnnnnnnnnnnnnnnnnnnnnnnnnnnnnnnnnnnnnnnnnnnnnnnnnnnnnnnnnnnnnnnnnnnnnnnnnnnnnnnnnnnnnnnnnnnnnnnnnnnnnnnnnnnnnnnnnnnnnnnnnnnnnnnnnnnnnnnnnnnnnnnnnnnnnnnnnnnnnnnnnnnnnnnnnnnnnnnnnnnnnnnnnnnnnnnnnnnnnnnnnnnnnnnnnnnnnnnnnnnnnnnnnnnnnnnnnnnnnnnnnnnnnnnnnnnnnnnnnnnnnnnnnnnnnnnnnnnnnnnnnnnnnnnnnnnnnnnnnnnnnnnnnnnnnnnnnnnnnnnnnnnnnnnnnnnnnnnnnnnnnnnnnnnnnnnnnnnnnnnnnnnnnnnnnnnnnnnnnnnnnnnnnnnnnnnnnnnnnnnnnnnnnnnnnnnnnnnnnnnnnnnnnnnnnnnnnnnnnnnnnnnnnnnnnnnnnnnnnnnnnnnnnnnnnnnnnnnnnnnnnnnnnnnnnnnnnnnnnnnnnnnnnnnnnnnnnnnnnnnnnnnnnnnnnnnnnnnnnnnnnnnnnnnnnnnnnnnnnnnnnnnnnnnnnnnnnnnnnnnnnnnnnnnnnnnnnnnnnnnnnnnnnnnnnnnnnnnnnnnnnnnnnnnnnnnnnnnnnnnnnnnnnnnnnnnnnnnnnnnnnnnnnnnnnnnnnnnnnnnnnnnnnnnnnnnnnnnnnnnnnnnnnnnnnnnnnnnnnnnnnnnnnnnnnnnnnnnnnnnnnnnnnnnnnnnnnnnnnnnnnnnnnnnnnnnnnnnnnnnnnnnnnnnnnnnnnnnnnnnnnnnnnnnnnnnnnnnnnnnnnnnnnnnnnnnnnnnnnnnnnnnnnnnnnnnnnnnnnnnnnnnnnnnnnnnnnnnnnnnnnnnnnnnnnnnnnnnnnnnnnnnnnnnnnnnnnnnnnnnnnnnnnnnnnnnnnnnnnnnnnnnnnnnnnnnnnnnnnnnnnnnnnnnnnnnnnnnnnnnnnnnnnnnnnnnnnnnnnnnnnnnnnnnnnnnnnnnnnnnnnnnnnnnnnnnnnnnnnnnnnnnnnnnnnnnnnnnnnnnnnnnnnnnnnnnnnnnnnnnnnnnnnnnnnnnnnnnnnnnnnnnnnnnnnnnnnnnnnnnnnnnnnnnnnnnnnnnnnnnnnnnnnnnnnnnnnnnnnnnnnnnnnnnnnnnnnnnnnnnnnnnnnnnnnnnnnnnnnnnnnnnnnnnnnnnnnnnnnnnnnnnnnnnnnnnnnnnnnnnnnnnnnnnnnnnnnnnnnnnnnnnnnnnnnnnnnnnnnnnnnnnnnnnnnnnnnnnnnnnnnnnnnnnnnnnnnnnnnnnnnnnnnnnnnnnnnnnnnnnnnnnnnnnnnnnnnnnnnnnnnnnnnnnnnnnnnnnnnnnnnnnnnnnnnnnnnnnnnnnnnnnnnnnnnnnnnnnnnnnnnnnnnnnnnnnnnnnnnnnnnnnnnnnnnnnnnnnnnnnnnnnnnnnnnnnnnnnnnnnnnnnnnnnnnnnnnnnnnnnnnnnnnnnnnnnnnnnnnnnnnnnnnnnnnnnnnnnnnnnnnnnnnnnnnnnnnnnnnnnnnnnnnnnnnnnnnnnnnnnnnnnnnnnnnnnnnnnnnnnnnnnnnnnnnnnnnnnnnnnnnnnnnnnnnnnnnnnnnnnnnnnnnnnnnnnnnnnnnnnnnnnnnnnnnnnnnnnnnnnnnnnnnnnnnnnnnnnnnnnnnnnnnnnnnnnnnnnnnnnnnnnnnnnnnnnnnnnnnnnnnnnnnnnnnnnnnnnnnnnnnnnnnnnnnnnnnnnnnnnnnnnnnnnnnnnnnnnnnnnnnnnnnnnnnnnnnnnnnnnnnnnnnnnnnnnnnnnnnnnnnnnnnnnnnnnnnnnnnnnnnnnnnnnnnnnnnnnnnnnnnnnnnnnnnnnnnnnnnnnnnnnnnnnnnnnnnnnnnnnnnnnnnnnnnnnnnnnnnnnnnnnnnnnnnnnnnnnnnnnnnnnnnnnnnnnnnnnnnnnnnnnnnnnnnnnnnnnnnnnnnnnnnnnnnnnnnnnnnnnnnnnnnnnnnnnnnnnnnnnnnnnnnnnnnnnnnnnnnnnnnnnnnnnnnnnnnnnnnnnnnnnnnnnnnnnnnnnnnnnnnnnnnnnnnnnnnnnnnnnnnnnnnnnnnnnnnnnnnnnnnnnnnnnnnnnnnnnnnnnnnnnnnnnnnnnnnnnnnnnnnnnnnnnnnnnnnnnnnnnnnnnnnnnnnnnnnnnnnnnnnnnnnnnnnnnnnnnnnnnnnnnnnnnnnnnnnnnnnnnnnnnnnnnnnnnnnnnnnnnnnnnnnnnnnnnnnnnnnnnnnnnnnnnnnnnnnnnnnnnnnnnnnnnnnnnnnnnnnnnnnnnnnnnnnnnnnnnnnnnnnnnnnnnnnnnnnnnnnnnnnnnnnnnnnnnnnnnnnnnnnnnnnnnnnnnnnnnnnnnnnnnnnnnnnnnnnnnnnnnnnnnnnnnnnnnnnnnnnnnnnnnnnnnnnnnnnnnnnnnnnnnnnnnnnnnnnnnnnnnnnnnnnnnnnnnnnnnnnnnnnnnnnnnnnnnnnnnnnnnnnnnnnnnnnnnnnnnnnnnnnnnnnnnnnnnnnnnnnnnnnnnnnnnnnnnnnnnnnnnnnnnnnnnnnnnnnnnnnnnnnnnnnnnnnnnnnnnnnnnnnnnnnnnnnnnnnnnnnnnnnnnnnnnnnnnnnnnnnnnnnnnnnnnnnnnnnnnnnnnnnnnnnnnnnnnnnnnnnnnnnnnnnnnnnnnnnnnnnnnnnnnnnnnnnnnnnnnnnnnnnnnnnnnnnnnnnnnnnnnnnnnnnnnnnnnnnnnnnnnnnnnnnnnnnnnnnnnnnnnnnnnnnnnnnnnnnnnnnnnnnnnnnnnnnnnnnnnnnnnnnnnnnnnnnnnnnnnnnnnnnnnnnnnnnnnnnnnnnnnnnnnnnnnnnnnnnnnnnnnnnnnnnnnnnnnnnnnnnnnnnnnnnnnnnnnnnnnnnnnnnnnnnnnnnnnnnnnnnnnnnnnnnnnnnnnnnnnnnnnnnnnnnnnnnnnnnnnnnnnnnnnnnnnnnnnnnnnnnnnnnnnnnnnnnnnnnnnnnnnnnnnnnnnnnnnnnnnnnnnnnnnnnnnnnnnnnnnnnnnnnnnnnnnnnnnnnnnnnnnnnnnnnnnnnnnnnnnnnnnnnnnnnnnnnnnnnnnnnnnnnnnnnnnnnnnnnnnnnnnnnnnnnnnnnnnnnnnnnnnnnnnnnnnnnnnnnnnnnnnnnnnnnnnnnnnnnnnnnnnnnnnnnnnnnnnnnnnnnnnnnnnnnnnnnnnnnnnnnnnnnnnnnnnnnnnnnnnnnnnnnnnnnnnnnnnnnnnnnnnnnnnnnnnnnnnnnnnnnnnnnnnnnnnnnnnnnnnnnnnnnnnnnnnnnnnnnnnnnnnnnnnnnnnnnnnnnnnnnnnnnnnnnnnnnnnnnnnnnnnnnnnnnnnnnnnnnnnnnnnnnnnnnnnnnnnnnnnnnnnnnnnnnnnnnnnnnnnnnnnnnnnnnnnnnnnnnnnnnnnnnnnnnnnnnnnnnnnnnnnnnnnnnnnnnnnnnnnnnnnnnnnnnnnnnnnnnnnnnnnnnnnnnnnnnnnnnnnnnnnnnnnnnnnnnnnnnnnnnnnnnnnnnnnnnnnnnnnnnnnnnnnnnnnnnnnnnnnnnnnnnnnnnnnnnnnnnnnnnnnnnnnnnnnnnnnnnnnnnnnnnnnnnnnnnnnnnnnnnnnnnnnnnnnnnnnnnnnnnnnnnnnnnnnnnnnnnnnnnnnnnnnnnnnnnnnnnnnnnnnnnnnnnnnnnnnnnnnnnnnnnnnnnnnnnnnnnnnnnnnnnnnnnnnnnnnnnnnnnnnnnnnnnnnnnnnnnnnnnnnnnnnnnnnnnnnnnnnnnnnnnnnnnnnnnnnnnnnnnnnnnnnnnnnnnnnnnnnnnnnnnnnnnnnnnnnnnnnnnnnnnnnnnnnnnnnnnnnnnnnnnnnnnnnnnnnnnnnnnnnnnnnnnnnnnnnnnnnnnnnnnnnnnnnnnnnnnnnnnnnnnnnnnnnnnnnnnnnnnnnnnnnnnnnnnnnnnnnnnnnnnnnnnnnnnnnnnnnnnnnnnnnnnnnnnnnnnnnnnnnnnnnnnnnnnnnnnnnnnnnnnnnnnnnnnnnnnnnnnnnnnnnnnnnnnnnnnnnnnnnnnnnnnnnnnnnnnnnnnnnnnnnnnnnnnnnnnnnnnnnnnnnnnnnnnnnnnnnnnnnnnnnnnnnnnnnnnnnnnnnnnnnnnnnnnnnnnnnnnnnnnnnnnnnnnnnnnnnnnnnnnnnnnnnnnnnnnnnnnnnnnnnnnnnnnnnnnnnnnnnnnnnnnnnnnnnnnnnnnnnnnnnnnnnnnnnnnnnnnnnnnnnnnnnnnnnnnnnnnnnnnnnnnnnnnnnnnnnnnnnnnnnnnnnnnnnnnnnnnnnnnnnnnnnnnnnnnnnnnnnnnnnnnnnnnnnnnnnnnnnnnnnnnnnnnnnnnnnnnnnnnnnnnnnnnnnnnnnnnnnnnnnnnnnnnnnnnnnnnnnnnnnnnnnnnnnnnnnnnnnnnnnnnnnnnnnnnnnnnnnnnnnnnnnnnnnnnnnnnnnnnnnnnnnnnnnnnnnnnnnnnnnnnnnnnnnnnnnnnnnnnnnnnnnnnnnnnnnnnnnnnnnnnnnnnnnnnnnnnnnnnnnnnnnnnnnnnnnnnnnnnnnnnnnnnnnnnnnnnnnnnnnnnnnnnnnnnnnnnnnnnnnnnnnnnnnnnnnnnnnnnnnnnnnnnnnnnnnnnnnnnnnnnnnnnnnnnnnnnnnnnnnnnnnnnnnnnnnnnnnnnnnnnnnnnnnnnnnnnnnnnnnnnnnnnnnnnnnnnnnnnnnnnnnnnnnnnnnnnnnnnnnnnnnnnnnnnnnnnnnnnnnnnnnnnnnnnnnnnnnnnnnnnnnnnnnnnnnnnnnnnnnnnnnnnnnnnnnnnnnnnnnnnnnnnnnnnnnnnnnnnnnnnnnnnnnnnnnnnnnnnnnnnnnnnnnnnnnnnnnnnnnnnnnnnnnnnnnnnnnnnnnnnnnnnnnnnnnnnnnnnnnnnnnnnnnnnnnnnnnnnnnnnnnnnnnnnnnnnnnnnnnnnnnnnnnnnnnnnnnnnnnnnnnnnnnnnnnnnnnnnnnnnnnnnnnnnnnnnnnnnnnnnnnnnnnnnnnnnnnnnnnnnnnnnnnnnnnnnnnnnnnnnnnnnnnnnnnnnnnnnnnnnnnnnnnnnnnnnnnnnnnnnnnnnnnnnnnnnnnnnnnnnnnnnnnnnnnnnnnnnnnnnnnnnnnnnnnnnnnnnnnnnnnnnnnnnnnnnnnnnnnnnnnnnnnnnnnnnnnnnnnnnnnnnnnnnnnnnnnnnnnnnnnnnnnnnnnnnnnnnnnnnnnnnnnnnnnnnnnnnnnnnnnnnnnnnnnnnnnnnnnnnnnnnnnnnnnnnnnnnnnnnnnnnnnnnnnnnnnnnnnnnnnnnnnnnnnnnnnnnnnnnnnnnnnnnnnnnnnnnnnnnnnnnnnnnnnnnnnnnnnnnnnnnnnnnnnnnnnnnnnnnnnnnnnnnnnnnnnnnnnnnnnnnnnnnnnnnnnnnnnnnnnnnnnnnnnnnnnnnnnnnnnnnnnnnnnnnnnnnnnnnnnnnnnnnnnnnnnnnnnnnnnnnnnnnnnnnnnnnnnnnnnnnnnnnnnnnnnnnnnnnnnnnnnnnnnnnnnnnnnnnnnnnnnnnnnnnnnnnnnnnnnnnnnnnnnnnnnnnnnnnnnnnnnnnnnnnnnnnnnnnnnnnnnnnnnnnnnnnnnnnnnnnnnnnnnnnnnnnnnnnnnnnnnnnnnnnnnnnnnnnnnnnnnnnnnnnnnnnnnnnnnnnnnnnnnnnnnnnnnnnnnnnnnnnnnnnnnnnnnnnnnnnnnnnnnnnnnnnnnnnnnnnnnnnnnnnnnnnnnnnnnnnnnnnnnnnnnnnnnnnnnnnnnnnnnnnnnnnnnnnnnnnnnnnnnnnnnnnnnnnnnnnnnnnnnnnnnnnnnnnnnnnnnnnnnnnnnnnnnnnnnnnnnnnnnnnnnnnnnnnnnnnnnnnnnnnnnnnnnnnnnnnnnnnnnnnnnnnnnnnnnnnnnnnnnnnnnnnnnnnnnnnnnnnnnnnnnnnnnnnnnnnnnnnnnnnnnnnnnnnnnnnnnnnnnnnnnnnnnnnnnnnnnnnnnnnnnnnnnnnnnnnnnnnnnnnnnnnnnnnnnnnnnnnnnnnnnnnnnnnnnnnnnnnnnnnnnnnnnnnnnnnnnnnnnnnnnnnnnnnnnnnnnnnnnnnnnnnnnnnnnnnnnnnnnnnnnnnnnnnnnnnnnnnnnnnnnnnnnnnnnnnnnnnnnnnnnnnnnnnnnnnnnnnnnnnnnnnnnnnnnnnnnnnnnnnnnnnnnnnnnnnnnnnnnnnnnnnnnnnnnnnnnnnnnnnnnnnnnnnnnnnnnnnnnnnnnnnnnnnnnnnnnnnnnnnnnnnnnnnnnnnnnnnnnnnnnnnnnnnnnnnnnnnnnnnnnnnnnnnnnnnnnnnnnnnnnnnnnnnnnnnnnnnnnnnnnnnnnnnnnnnnnnnnnnnnnnnnnnnnnnnnnnnnnnnnnnnnnnnnnnnnnnnnnnnnnnnnnnnnnnnnnnnnnnnnnnnnnnnnnnnnnnnnnnnnnnnnnnnnnnnnnnnnnnnnnnnnnnnnnnnnnnnnnnnnnnnnnnnnnnnnnnnnnnnnnnnnnnnnnnnnnnnnnnnnnnnnnnnnnnnnnnnnnnnnnnnnnnnnnnnnnnnnnnnnnnnnnnnnnnnnnnnnnnnnnnnnnnnnnnnnnnnnnnnnnnnnnnnnnnnnnnnnnnnnnnnnnnnnnnnnnnnnnnnnnnnnnnnnnnnnnnnnnnnnnnnnnnnnnnnnnnnnnnnnnnnnnnnnnnnnnnnnnnnnnnnnnnnnnnnnnnnnnnnnnnnnnnnnnnnnnnnnnnnnnnnnnnnnnnnnnnnnnnnnnnnnnnnnnnnnnnnnnnnnnnnnnnnnnnnnnnnnnnnnnnnnnnnnnnnnnnnnnnnnnnnnnnnnnnnnnnnnnnnnnnnnnnnnnnnnnnnnnnnnnnnnnnnnnnnnnnnnnnnnnnnnnnnnnnnnnnnnnnnnnnnnnnnnnnnnnnnnnnnnnnnnnnnnnnnnnnnnnnnnnnnnnnnnnnnnnnnnnnnnnnnnnnnnnnnnnnnnnnnnnnnnnnnnnnnnnnnnnnnnnnnnnnnnnnnnnnnnnnnnnnnnnnnnnnnnnnnnnnnnnnnnnnnnnnnnnnnnnnnnnnnnnnnnnnnnnnnnnnnnnnnnnnnnnnnnnnnnnnnnnnnnnnnnnnnnnnnnnnnnnnnnnnnnnnnnnnnnnnnnnnnnnnnnnnnnnnnnnnnnnnnnnnnnnnnnnnnnnnnnnnnnnnnnnnnnnnnnnnnnnnnnnnnnnnnnnnnnnnnnnnnnnnnnnnnnnnnnnnnnnnnnnnnnnnnnnnnnnnnnnnnnnnnnnnnnnnnnnnnnnnnnnnnnnnnnnnnnnnnnnnnnnnnnnnnnnnnnnnnnnnnnnnnnnnnnnnnnnnnnnnnnnnnnnnnnnnnnnnnnnnnnnnnnnnnnnnnnnnnnnnnnnnnnnnnnnnnnnnnnnnnnnnnnnnnnnnnnnnnnnnnnnnnnnnnnnnnnnnnnnnnnnnnnnnnnnnnnnnnnnnnnnnnnnnnnnnnnnnnnnnnnnnnnnnnnnnnnnnnnnnnnnnnnnnnnnnnnnnnnnnnnnnnnnnnnnnnnnnnnnnnnnnnnnnnnnnnnnnnnnnnnnnnnnnnnnnnnnnnnnnnnnnnnnnnnnnnnnnnnnnnnnnnnnnnnnnnnnnnnnnnnnnnnnnnnnnnnnnnnnnnnnnnnnnnnnnnnnnnnnnnnnnnnnnnnnnnnnnnnnnnnnnnnnnnnnnnnnnnnnnnnnnnnnnnnnnnnnnnnnnnnnnnnnnnnnnnnnnnnnnnnnnnnnnnnnnnnnnnnnnnnnnnnnnnnnnnnnnnnnnnnnnnnnnnnnnnnnnnnnnnnnnnnnnnnnnnnnnnnnnnnnnnnnnnnnnnnnnnnnnnnnnnnnnnnnnnnnnnnnnnnnnnnnnnnnnnnnnnnnnnnnnnnnnnnnnnnnnnnnnnnnnnnnnnnnnnnnnnnnnnnnnnnnnnnnnnnnnnnnnnnnnnnnnnnnnnnnnnnnnnnnnnnnnnnnnnnnnnnnnnnnnnnnnnnnnnnnnnnnnnnnnnnnnnnnnnnnnnnnnnnnnnnnnnnnnnnnnnnnnnnnnnnnnnnnnnnnnnnnnnnnnnnnnnnnnnnnnnnnnnnnnnnnnnnnnnnnnnnnnnnnnnnnnnnnnnnnnnnnnnnnnnnnnnnnnnnnnnnnnnnnnnnnnnnnnnnnnnnnnnnnnnnnnnnnnnnnnnnnnnnnnnnnnnnnnnnnnnnnnnnnnnnnnnnnnnnnnnnnnnnnnnnnnnnnnnnnnnnnnnnnnnnnnnnnnnnnnnnnnnnnnnnnnnnnnnnnnnnnnnnnnnnnnnnnnnnnnnnnnnnnnnnnnnnnnnnnnnnnnnnnnnnnnnnnnnnnnnnnnnnnnnnnnnnnnnnnnnnnnnnnnnnnnnnnnnnnnnnnnnnnnnnnnnnnnnnnnnnnnnnnnnnnnnnnnnnnnnnnnnnnnnnnnnnnnnnnnnnnnnnnnnnnnnnnnnnnnnnnnnnnnnnnnnnnnnnnnnnnnnnnnnnnnnnnnnnnnnnnnnnnnnnnnnnnnnnnnnnnnnnnnnnnnnnnnnnnnnnnnnnnnnnnnnnnnnnnnnnnnnnnnnnnnnnnnnnnnnnnnnnnnnnnnnnnnnnnnnnnnnnnnnnnnnnnnnnnnnnnnnnnnnnnnnnnnnnnnnnnnnnnnnnnnnnnnnnnnnnnnnnnnnnnnnnnnnnnnnnnnnnnnnnnnnnnnnnnnnnnnnnnnnnnnnnnnnnnnnnnnnnnnnnnnnnnnnnnnnnnnnnnnnnnnnnnnnnnnnnnnnnnnnnnnnnnnnnnnnnnnnnnnnnnnnnnnnnnnnnnnnnnnnnnnnnnnnnnnnnnnnnnnnnnnnnnnnnnnnnnnnnnnnnnnnnnnnnnnnnnnnnnnnnnnnnnnnnnnnnnnnnnnnnnnnnnnnnnnnnnnnnnnnnnnnnnnnnnnnnnnnnnnnnnnnnnnnnnnnnnnnnnnnnnnnnnnnnnnnnnnnnnnnnnnnnnnnnnnnnnnnnnnnnnnnnnnnnnnnnnnnnnnnnnnnnnnnnnnnnnnnnnnnnnnnnnnnnnnnnnnnnnnnnnnnnnnnnnnnnnnnnnnnnnnnnnnnnnnnnnnnnnnnnnnnnnnnnnnnnnnnnnnnnnnnnnnnnnnnnnnnnnnnnnnnnnnnnnnnnnnnnnnnnnnnnnnnnnnnnnnnnnnnnnnnnnnnnnnnnnnnnnnnnnnnnnnnnnnnnnnnnnnnnnnnnnnnnnnnnnnnnnnnnnnnnnnnnnnnnnnnnnnnnnnnnnnnnnnnnnnnnnnnnnnnnnnnnnnnnnnnnnnnnnnnnnnnnnnnnnnnnnnnnnnnnnnnnnnnnnnnnnnnnnnnnnnnnnnnnnnnnnnnnnnnnnnnnnnnnnnnnnnnnnnnnnnnnnnnnnnnnnnnnnnnnnnnnnnnnnnnnnnnnnnnnnnnnnnnnnnnnnnnnnnnnnnnnnnnnnnnnnnnnnnnnnnnnnnnnnnnnnnnnnnnnnnnnnnnnnnnnnnnnnnnnnnnnnnnnnnnnnnnnnnnnnnnnnnnnnnnnnnnnnnnnnnnnnnnnnnnnnnnnnnnnnnnnnnnnnnnnnnnnnnnnnnnnnnnnnnnnnnnnnnnnnnnnnnnnnnnnnnnnnnnnnnnnnnnnnnnnnnnnnnnnnnnnnnnnnnnnnnnnnnnnnnnnnnnnnnnnnnnnnnnnnnnnnnnnnnnnnnnnnnnnnnnnnnnnnnnnnnnnnnnnnnnnnnnnnnnnnnnnnnnnnnnnnnnnnnnnnnnnnnnnnnnnnnnnnnnnnnnnnnnnnnnnnnnnnnnnnnnnnnnnnnnnnnnnnnnnnnnnnnnnnnnnnnnnnnnnnnnnnnnnnnnnnnnnnnnnnnnnnnnnnnnnnnnnnnnnnnnnnnnnnnnnnnnnnnnnnnnnnnnnnnnnnnnnnnnnnnnnnnnnnnnnnnnnnnnnnnnnnnnnnnnnnnnnnnnnnnnnnnnnnnnnnnnnnnnnnnnnnnnnnnnnnnnnnnnnnnnnnnnnnnnnnnnnnnnnnnnnnnnnnnnnnnnnnnnnnnnnnnnnnnnnnnnnnnnnnnnnnnnnnnnnnnnnnnnnnnnnnnnnnnnnnnnnnnnnnnnnnnnnnnnnnnnnnnnnnnnnnnnnnnnnnnnnnnnnnnnnnnnnnnnnnnnnnnnnnnnnnnnnnnnnnnnnnnnnnnnnnnnnnnnnnnnnnnnnnnnnnnnnnnnnnnnnnnnnnnnnnnnnnnnnnnnnnnnnnnnnnnnnnnnnnnnnnnnnnnnnnnnnnnnnnnnnnnnnnnnnnnnnnnnnnnnnnnnnnnnnnnnnnnnnnnnnnnnnnnnnnnnnnnnnnnnnnnnnnnnnnnnnnnnnnnnnnnnnnnnnnnnnnnnnnnnnnnnnnnnnnnnnnnnnnnnnnnnnnnnnnnnnnnnnnnnnnnnnnnnnnnnnnnnnnnnnnnnnnnnnnnnnnnnnnnnnnnnnnnnnnnnnnnnnnnnnnnnnnnnnnnnnnnnnnnnnnnnnnnnnnnnnnnnnnnnnnnnnnnnnnnnnnnnnnnnnnnnnnnnnnnnnnnnnnnnnnnnnnnnnnnnnnnnnnnnnnnnnnnnnnnnnnnnnnnnnnnnnnnnnnnnnnnnnnnnnnnnnnnnnnnnnnnnnnnnnnnnnnnnnnnnnnnnnnnnnnnnnnnnnnnnnnnnnnnnnnnnnnnnnnnnnnnnnnnnnnnnnnnnnnnnnnnnnnnnnnnnnnnnnnnnnnnnnnnnnnnnnnnnnnnnnnnnnnnnnnnnnnnnnnnnnnnnnnnnnnnnnnnnnnnnnnnnnnnnnnnnnnnnnnnnnnnnnnnnnnnnnnnnnnnnnnnnnnnnnnnnnnnnnnnnnnnnnnnnnnnnnnnnnnnnnnnnnnnnnnnnnnnnnnnnnnnnnnnnnnnnnnnnnnnnnnnnnnnnnnnnnnnnnnnnnnnnnnnnnnnnnnnnnnnnnnnnnnnnnnnnnnnnnnnnnnnnnnnnnnnnnnnnnnnnnnnnnnnnnnnnnnnnnnnnnnnnnnnnnnnnnnnnnnnnnnnnnnnnnnnnnnnnnnnnnnnnnnnnnnnnnnnnnnnnnnnnnnnnnnnnnnnnnnnnnnnnnnnnnnnnnnnnnnnnnnnnnnnnnnnnnnnnnnnnnnnnnnnnnnnnnnnnnnnnnnnnnnnnnnnnnnnnnnnnnnnnnnnnnnnnnnnnnnnnnnnnnnnnnnnnnnnnnnnnnnnnnnnnnnnnnnnnnnnnnnnnnnnnnnnnnnnnnnnnnnnnnnnnnnnnnnnnnnnnnnnnnnnnnnnnnnnnnnnnnnnnnnnnnnnnnnnnnnnnnnnnnnnnnnnnnnnnnnnnnnnnnnnnnnnnnnnnnnnnnnnnnnnnnnnnnnnnnnnnnnnnnnnnnnnnnnnnnnnnnnnnnnnnnnnnnnnnnnnnnnnnnnnnnnnnnnnnnnnnnnnnnnnnnnnnnnnnnnnnnnnnnnnnnnnnnnnnnnnnnnnnnnnnnnnnnnnnnnnnnnnnnnnnnnnnnnnnnnnnnnnnnnnnnnnnnnnnnnnnnnnnnnnnnnnnnnnnnnnnnnnnnnnnnnnnnnnnnnnnnnnnnnnnnnnnnnnnnnnnnnnnnnnnnnnnnnnnnnnnnnnnnnnnnnnnnnnnnnnnnnnnnnnnnnnnnnnnnnnnnnnnnnnnnnnnnnnnnnnnnnnnnnnnnnnnnnnnnnnnnnnnnnnnnnnnnnnnnnnnnnnnnnnnnnnnnnnnnnnnnnnnnnnnnnnnnnnnnnnnnnnnnnnnnnnnnnnnnnnnnnnnnnnnnnnnnnnnnnnnnnnnnnnnnnnnnnnnnnnnnnnnnnnnnnnnnnnnnnnnnnnnnnnnnnnnnnnnnnnnnnnnnnnnnnnnnnnnnnnnnnnnnnnnnnnnnnnnnnnnnnnnnnnnnnnnnnnnnnnnnnnnnnnnnnnnnnnnnnnnnnnnnnnnnnnnnnnnnnnnnnnnnnnnnnnnnnnnnnnnnnnnnnnnnnnnnnnnnnnnnnnnnnnnnnnnnnnnnnnnnnnnnnnnnnnnnnnnnnnnnnnnnnnnnnnnnnnnnnnnnnnnnnnnnnnnnnnnnnnnnnnnnnnnnnnnnnnnnnnnnnnnnnnnnnnnnnnnnnnnnnnnnnnnnnnnnnnnnnnnnnnnnnnnnnnnnnnnnnnnnnnnnnnnnnnnnnnnnnnnnnnnnnnnnnnnnnnnnnnnnnnnnnnnnnnnnnnnnnnnnnnnnnnnnnnnnnnnnnnnnnnnnnnnnnnnnnnnnnnnnnnnnnnnnnnnnnnnnnnnnnnnnnnnnnnnnnnnnnnnnnnnnnnnnnnnnnnnnnnnnnnnnnnnnnnnnnnnnnnnnnnnnnnnnnnnnnnnnnnnnnnnnnnnnnnnnnnnnnnnnnnnnnnnnnnnnnnnnnnnnnnnnnnnnnnnnnnnnnnnnnnnnnnnnnnnnnnnnnnnnnnnnnnnnnnnnnnnnnnnnnnnnnnnnnnnnnnnnnnnnnnnnnnnnnnnnnnnnnnnnnnnnnnnnnnnnnnnnnnnnnnnnnnnnnnnnnnnnnnnnnnnnnnnnnnnnnnnnnnnnnnnnnnnnnnnnnnnnnnnnnnnnnnnnnnnnnnnnnnnnnnnnnnnnnnnnnnnnnnnnnnnnnnnnnnnnnnnnnnnnnnnnnnnnnnnnnnnnnnnnnnnnnnnnnnnnnnnnnnnnnnnnnnnnnnnnnnnnnnnnnnnnnnnnnnnnnnnnnnnnnnnnnnnnnnnnnnnnnnnnnnnnnnnnnnnnnnnnnnnnnnnnnnnnnnnnnnnnnnnnnnnnnnnnnnnnnnnnnnnnnnnnnnnnnnnnnnnnnnnnnnnnnnnnnnnnnnnnnnnnnnnnnnnnnnnnnnnnnnnnnnnnnnnnnnnnnnnnnnnnnnnnnnnnnnnnnnnnnnnnnnnnnnnnnnnnnnnnnnnnnnnnnnnnnnnnnnnnnnnnnnnnnnnnnnnnnnnnnnnnnnnnnnnnnnnnnnnnnnnnnnnnnnnnnnnnnnnnnnnnnnnnnnnnnnnnnnnnnnnnnnnnnnnnnnnnnnnnnnnnnnnnnnnnnnnnnnnnnnnnnnnnnnnnnnnnnnnnnnnnnnnnnnnnnnnnnnnnnnnnnnnnnnnnnnnnnnnnnnnnnnnnnnnnnnnnnnnnnnnnnnnnnnnnnnnnnnnnnnnnnnnnnnnnnnnnnnnnnnnnnnnnnnnnnnnnnnnnnnnnnnnnnnnnnnnnnnnnnnnnnnnnnnnnnnnnnnnnnnnnnnnnnnnnnnnnnnnnnnnnnnnnnnnnnnnnnnnnnnnnnnnnnnnnnnnnnnnnnnnnnnnnnnnnnnnnnnnnnnnnnnnnnnnnnnnnnnnnnnnnnnnnnnnnnnnnnnnnnnnnnnnnnnnnnnnnnnnnnnnnnnnnnnnnnnnnnnnnnnnnnnnnnnnnnnnnnnnnnnnnnnnnnnnnnnnnnnnnnnnnnnnnnnnnnnnnnnnnnnnnnnnnnnnnnnnnnnnnnnnnnnnnnnnnnnnnnnnnnnnnnnnnnnnnnnnnnnnnnnnnnnnnnnnnnnnnnnnnnnnnnnnnnnnnnnnnnnnnnnnnnnnnnnnnnnnnnnnnnnnnnnnnnnnnnnnnnnnnnnnnnnnnnnnnnnnnnnnnnnnnnnnnnnnnnnnnnnnnnnnnnnnnnnnnnnnnnnnnnnnnnnnnnnnnnnnnnnnnnnnnnnnnnnnnnnnnnnnnnnnnnnnnnnnnnnnnnnnnnnnnnnnnnnnnnnnnnnnnnnnnnnnnnnnnnnnnnnnnnnnnnnnnnnnnnnnnnnnnnnnnnnnnnnnnnnnnnnnnnnnnnnnnnnnnnnnnnnnnnnnnnnnnnnnnnnnnnnnnnnnnnnnnnnnnnnnnnnnnnnnnnnnnnnnnnnnnnnnnnnnnnnnnnnnnnnnnnnnnnnnnnnnnnnnnnnnnnnnnnnnnnnnnnnnnnnnnnnnnnnnnnnnnnnnnnnnnnnnnnnnnnnnnnnnnnnnnnnnnnnnnnnnnnnnnnnnnnnnnnnnnnnnnnnnnnnnnnnnnnnnnnnnnnnnnnnnnnnnnnnnnnnnnnnnnnnnnnnnnnnnnnnnnnnnnnnnnnnnnnnnnnnnnnnnnnnnnnnnnnnnnnnnnnnnnnnnnnnnnnnnnnnnnnnnnnnnnnnnnnnnnnnnnnnnnnnnnnnnnnnnnnnnnnnnnnnnnnnnnnnnnnnnnnnnnnnnnnnnnnnnnnnnnnnnnnnnnnnnnnnnnnnnnnnnnnnnnnnnnnnnnnnnnnnnnnnnnnnnnnnnnnnnnnnnnnnnnnnnnnnnnnnnnnnnnnnnnnnnnnnnnnnnnnnnnnnnnnnnnnnnnnnnnnnnnnnnnnnnnnnnnnnnnnnnnnnnnnnnnnnnnnnnnnnnnnnnnnnnnnnnnnnnnnnnnnnnnnnnnnnnnnnnnnnnnnnnnnnnnnnnnnnnnnnnnnnnnnnnnnnnnnnnnnnnnnnnnnnnnnnnnnnnnnnnnnnnnnnnnnnnnnnnnnnnnnnnnnnnnnnnnnnnnnnnnnnnnnnnnnnnnnnnnnnnnnnnnnnnnnnnnnnnnnnnnnnnnnnnnnnnnnnnnnnnnnnnnnnnnnnnnnnnnnnnnnnnnnnnnnnnnnnnnnnnnnnnnnnnnnnnnnnnnnnnnnnnnnnnnnnnnnnnnnnnnnnnnnnnnnnnnnnnnnnnnnnnnnnnnnnnnnnnnnnnnnnnnnnnnnnnnnnnnnnnnnnnnnnnnnnnnnnnnnnnnnnnnnnnnnnnnnnnnnnnnnnnnnnnnnnnnnnnnnnnnnnnnnnnnnnnnnnnnnnnnnnnnnnnnnnnnnnnnnnnnnnnnnnnnnnnnnnnnnnnnnnnnnnnnnnnnnnnnnnnnnnnnnnnnnnnnnnnnnnnnnnnnnnnnnnnnnnnnnnnnnnnnnnnnnnnnnnnnnnnnnnnnnnnnnnnnnnnnnnnnnnnnnnnnnnnnnnnnnnnnnnnnnnnnnnnnnnnnnnnnnnnnnnnnnnnnnnnnnnnnnnnnnnnnnnnnnnnnnnnnnnnnnnnnnnnnnnnnnnnnnnnnnnnnnnnnnnnnnnnnnnnnnnnnnnnnnnnnnnnnnnnnnnnnnnnnnnnnnnnnnnnnnnnnnnnnnnnnnnnnnnnnnnnnnnnnnnnnnnnnnnnnnnnnnnnnnnnnnnnnnnnnnnnnnnnnnnnnnnnnnnnnnnnnnnnnnnnnnnnnnnnnnnnnnnnnnnnnnnnnnnnnnnnnnnnnnnnnnnnnnnnnnnnnnnnnnnnnnnnnnnnnnnnnnnnnnnnnnnnnnnnnnnnnnnnnnnnnnnnnnnnnnnnnnnnnnnnnnnnnnnnnnnnnnnnnnnnnnnnnnnnnnnnnnnnnnnnnnnnnnnnnnnnnnnnnnnnnnnnnnnnnnnnnnnnnnnnnnnnnnnnnnnnnnnnnnnnnnnnnnnnnnnnnnnnnnnnnnnnnnnnnnnnnnnnnnnnnnnnnnnnnnnnnnnnnnnnnnnnnnnnnnnnnnnnnnnnnnnnnnnnnnnnnnnnnnnnnnnnnnnnnnnnnnnnnnnnnnnnnnnnnnnnnnnnnnnnnnnnnnnnnnnnnnnnnnnnnnnnnnnnnnnnnnnnnnnnnnnnnnnnnnnnnnnnnnnnnnnnnnnnnnnnnnnnnnnnnnnnnnnnnnnnnnnnnnnnnnnnnnnnnnnnnnnnnnnnnnnnnnnnnnnnnnnnnnnnnnnnnnnnnnnnnnnnnnnnnnnnnnnnnnnnnnnnnnnnnnnnnnnnnnnnnnnnnnnnnnnnnnnnnnnnnnnnnnnnnnnnnnnnnnnnnnnnnnnnnnnnnnnnnnnnnnnnnnnnnnnnnnnnnnnnnnnnnnnnnnnnnnnnnnnnnnnnnnnnnnnnnnnnnnnnnnnnnnnnnnnnnnnnnnnnnnnnnnnnnnnnnnnnnnnnnnnnnnnnnnnnnnnnnnnnnnnnnnnnnnnnnnnnnnnnnnnnnnnnnnnnnnnnnnnnnnnnnnnnnnnnnnnnnnnnnnnnnnnnnnnnnnnnnnnnnnnnnnnnnnnnnnnnnnnnnnnnnnnnnnnnnnnnnnnnnnnnnnnnnnnnnnnnnnnnnnnnnnnnnnnnnnnnnnnnnnnnnnnnnnnnnnnnnnnnnnnnnnnnnnnnnnnnnnnnnnnnnnnnnnnnnnnnnnnnnnnnnnnnnnnnnnnnnnnnnnnnnnnnnnnnnnnnnnnnnnnnnnnnnnnnnnnnnnnnnnnnnnnnnnnnnnnnnnnnnnnnnnnnnnnnnnnnnnnnnnnnnnnnnnnnnnnnnnnnnnnnnnnnnnnnnnnnnnnnnnnnnnnnnnnnnnnnnnnnnnnnnnnnnnnnnnnnnnnnnnnnnnnnnnnnnnnnnnnnnnnnnnnnnnnnnnnnnnnnnnnnnnnnnnnnnnnnnnnnnnnnnnnnnnnnnnnnnnnnnnnnnnnnnnnnnnnnnnnnnnnnnnnnnnnnnnnnnnnnnnnnnnnnnnnnnnnnnnnnnnnnnnnnnnnnnnnnnnnnnnnnnnnnnnnnnnnnnnnnnnnnnnnnnnnnnnnnnnnnnnnnnnnnnnnnnnnnnnnnnnnnnnnnnnnnnnnnnnnnnnnnnnnnnnnnnnnnnnnnnnnnnnnnnnnnnnnnnnnnnnnnnnnnnnnnnnnnnnnnnnnnnnnnnnnnnnnnnnnnnnnnnnnnnnnnnnnnnnnnnnnnnnnnnnnnnnnnnnnnnnnnnnnnnnnnnnnnnnnnnnnnnnnnnnnnnnnnnnnnnnnnnnnnnnnnnnnnnnnnnnnnnnnnnnnnnnnnnnnnnnnnnnnnnnnnnnnnnnnnnnnnnnnnnnnnnnnnnnnnnnnnnnnnnnnnnnnnnnnnnnnnnnnnnnnnnnnnnnnnnnnnnnnnnnnnnnnnnnnnnnnnnnnnnnnnnnnnnnnnnnnnnnnnnnnnnnnnnnnnnnnnnnnnnnnnnnnnnnnnnnnnnnnnnnnnnnnnnnnnnnnnnnnnnnnnnnnnnnnnnnnnnnnnnnnnnnnnnnnnnnnnnnnnnnnnnnnnnnnnnnnnnnnnnnnnnnnnnnnnnnnnnnnnnnnnnnnnnnnnnnnnnnnnnnnnnnnnnnnnnnnnnnnnnnnnnnnnnnnnnnnnnnnnnnnnnnnnnnnnnnnnnnnnnnnnnnnnnnnnnnnnnnnnnnnnnnnnnnnnnnnnnnnnnnnnnnnnnnnnnnnnnnnnnnnnnnnnnnnnnnnnnnnnnnnnnnnnnnnnnnnnnnnnnnnnnnnnnnnnnnnnnnnnnnnnnnnnnnnnnnnnnnnnnnnnnnnnnnnnnnnnnnnnnnnnnnnnnnnnnnnnnnnnnnnnnnnnnnnnnnnnnnnnnnnnnnnnnnnnnnnnnnnnnnnnnnnnnnnnnnnnnnnnnnnnnnnnnnnnnnnnnnnnnnnnnnnnnnnnnnnnnnnnnnnnnnnnnnnnnnnnnnnnnnnnnnnnnnnnnnnnnnnnnnnnnnnnnnnnnnnnnnnnnnnnnnnnnnnnnnnnnnnnnnnnnnnnnnnnnnnnnnnnnnnnnnnnnnnnnnnnnnnnnnnnnnnnnnnnnnnnnnnnnnnnnnnnnnnnnnnnnnnnnnnnnnnnnnnnnnnnnnnnnnnnnnnnnnnnnnnnnnnnnnnnnnnnnnnnnnnnnnnnnnnnnnnnnnnnnnnnnnnnnnnnnnnnnnnnnnnnnnnnnnnnnnnnnnnnnnnnnnnnnnnnnnnnnnnnnnnnnnnnnnnnnnnnnnnnnnnnnnnnnnnnnnnnnnnnnnnnnnnnnnnnnnnnnnnnnnnnnnnnnnnnnnnnnnnnnnnnnnnnnnnnnnnnnnnnnnnnnnnnnnnnnnnnnnnnnnnnnnnnnnnnnnnnnnnnnnnnnnnnnnnnnnnnnnnnnnnnnnnnnnnnnnnnnnnnnnnnnnnnnnnnnnnnnnnnnnnnnnnnnnnnnnnnnnnnnnnnnnnnnnnnnnnnnnnnnnnnnnnnnnnnnnnnnnnnnnnnnnnnnnnnnnnnnnnnnnnnnnnnnnnnnnnnnnnnnnnnnnnnnnnnnnnnnnnnnnnnnnnnnnnnnnnnnnnnnnnnnnnnnnnnnnnnnnnnnnnnnnnnnnnnnnnnnnnnnnnnnnnnnnnnnnnnnnnnnnnnnnnnnnnnnnnnnnnnnnnnnnnnnnnnnnnnnnnnnnnnnnnnnnnnnnnnnnnnnnnnnnnnnnnnnnnnnnnnnnnnnnnnnnnnnnnnnnnnnnnnnnnnnnnnnnnnnnnnnnnnnnnnnnnnnnnnnnnnnnnnnnnnnnnnnnnnnnnnnnnnnnnnnnnnnnnnnnnnnnnnnnnnnnnnnnnnnnnnnnnnnnnnnnnnnnnnnnnnnnnnnnnnnnnnnnnnnnnnnnnnnnnnnnnnnnnnnnnnnnnnnnnnnnnnnnnnnnnnnnnnnnnnnnnnnnnnnnnnnnnnnnnnnnnnnnnnnnnnnnnnnnnnnnnnnnnnnnnnnnnnnnnnnnnnnnnnnnnnnnnnnnnnnnnnnnnnnnnnnnnnnnnnnnnnnnnnnnnnnnnnnnnnnnnnnnnnnnnnnnnnnnnnnnnnnnnnnnnnnnnnnnnnnnnnnnnnnnnnnnnnnnnnnnnnnnnnnnnnnnnnnnnnnnnnnnnnnnnnnnnnnnnnnnnnnnnnnnnnnnnnnnnnnnnnnnnnnnnnnnnnnnnnnnnnnnnnnnnnnnnnnnnnnnnnnnnnnnnnnnnnnnnnnnnnnnnnnnnnnnnnnnnnnnnnnnnnnnnnnnnnnnnnnnnnnnnnnnnnnnnnnnnnnnnnnnnnnnnnnnnnnnnnnnnnnnnnnnnnnnnnnnnnnnnnnnnnnnnnnnnnnnnnnnnnnnnnnnnnnnnnnnnnnnnnnnnnnnnnnnnnnnnnnnnnnnnnnnnnnnnnnnnnnnnnnnnnnnnnnnnnnnnnnnnnnnnnnnnnnnnnnnnnnnnnnnnnnnnnnnnnnnnnnnnnnnnnnnnnnnnnnnnnnnnnnnnnnnnnnnnnnnnnnnnnnnnnnnnnnnnnnnnnnnnnnnnnnnnnnnnnnnnnnnnnnnnnnnnnnnnnnnnnnnnnnnnnnnnnnnnnnnnnnnnnnnnnnnnnnnnnnnnnnnnnnnnnnnnnnnnnnnnnnnnnnnnnnnnnnnnnnnnnnnnnnnnnnnnnnnnnnnnnnnnnnnnnnnnnnnnnnnnnnnnnnnnnnnnnnnnnnnnnnnnnnnnnnnnnnnnnnnnnnnnnnnnnnnnnnnnnnnnnnnnnnnnnnnnnnnnnnnnnnnnnnnnnnnnnnnnnnnnnnnnnnnnnnnnnnnnnnnnnnnnnnnnnnnnnnnnnnnnnnnnnnnnnnnnnnnnnnnnnnnnnnnnnnnnnnnnnnnnnnnnnnnnnnnnnnnnnnnnnnnnnnnnnnnnnnnnnnnnnnnnnnnnnnnnnnnnnnnnnnnnnnnnnnnnnnnnnnnnnnnnnnnnnnnnnnnnnnnnnnnnnnnnnnnnnnnnnnnnnnnnnnnnnnnnnnnnnnnnnnnnnnnnnnnnnnnnnnnnnnnnnnnnnnnnnnnnnnnnnnnnnnnnnnnnnnnnnnnnnnnnnnnnnnnnnnnnnnnnnnnnnnnnnnnnnnnnnnnnnnnnnnnnnnnnnnnnnnnnnnnnnnnnnnnnnnnnnnnnnnnnnnnnnnnnnnnnnnnnnnnnnnnnnnnnnnnnnnnnnnnnnnnnnnnnnnnnnnnnnnnnnnnnnnnnnnnnnnnnnnnnnnnnnnnnnnnnnnnnnnnnnnnnnnnnnnnnnnnnnnnnnnnnnnnnnnnnnnnnnnnnnnnnnnnnnnnnnnnnnnnnnnnnnnnnnnnnnnnnnnnnnnnnnnnnnnnnnnnnnnnnnnnnnnnnnnnnnnnnnnnnnnnnnnnnnnnnnnnnnnnnnnnnnnnnnnnnnnnnnnnnnnnnnnnnnnnnnnnnnnnnnnnnnnnnnnnnnnnnnnnnnnnnnnnnnnnnnnnnnnnnnnnnnnnnnnnnnnnnnnnnnnnnnnnnnnnnnnnnnnnnnnnnnnnnnnnnnnnnnnnnnnnnnnnnnnnnnnnnnnnnnnnnnnnnnnnnnnnnnnnnnnnnnnnnnnnnnnnnnnnnnnnnnnnnnnnnnnnnnnnnnnnnnnnnnnnnnnnnnnnnnnnnnnnnnnnnnnnnnnnnnnnnnnnnnnnnnnnnnnnnnnnnnnnnnnnnnnnnnnnnnnnnnnnnnnnnnnnnnnnnnnnnnnnnnnnnnnnnnnnnnnnnnnnnnnnnnnnnnnnnnnnnnnnnnnnnnnnnnnnnnnnnnnnnnnnnnnnnnnnnnnnnnnnnnnnnnnnnnnnnnnnnnnnnnnnnnnnnnnnnnnnnnnnnnnnnnnnnnnnnnnnnnnnnnnnnnnnnnnnnnnnnnnnnnnnnnnnnnnnnnnnnnnnnnnnnnnnnnnnnnnnnnnnnnnnnnnnnnnnnnnnnnnnnnnnnnnnnnnnnnnnnnnnnnnnnnnnnnnnnnnnnnnnnnnnnnnnnnnnnnnnnnnnnnnnnnnnnnnnnnnnnnnnnnnnnnnnnnnnnnnnnnnnnnnnnnnnnnnnnnnnnnnnnnnnnnnnnnnnnnnnnnnnnnnnnnnnnnnnnnnnnnnnnnnnnnnnnnnnnnnnnnnnnnnnnnnnnnnnnnnnnnnnnnnnnnnnnnnnnnnnnnnnnnnnnnnnnnnnnnnnnnnnnnnnnnnnnnnnnnnnnnnnnnnnnnnnnnnnnnnnnnnnnnnnnnnnnnnnnnnnnnnnnnnnnnnnnnnnnnnnnnnnnnnnnnnnnnnnnnnnnnnnnnnnnnnnnnnnnnnnnnnnnnnnnnnnnnnnnnnnnnnnnnnnnnnnnnnnnnnnnnnnnnnnnnnnnnnnnnnnnnnnnnnnnnnnnnnnnnnnnnnnnnnnnnnnnnnnnnnnnnnnnnnnnnnnnnnnnnnnnnnnnnnnnnnnnnnnnnnnnnnnnnnnnnnnnnnnnnnnnnnnnnnnnnnnnnnnnnnnnnnnnnnnnnnnnnnnnnnnnnnnnnnnnnnnnnnnnnnnnnnnnnnnnnnnnnnnnnnnnnnnnnnnnnnnnnnnnnnnnnnnnnnnnnnnnnnnnnnnnnnnnnnnnnnnnnnnnnnnnnnnnnnnnnnnnnnnnnnnnnnnnnnnnnnnnnnnnnnnnnnnnnnnnnnnnnnnnnnnnnnnnnnnnnnnnnnnnnnnnnnnnnnnnnnnnnnnnnnnnnnnnnnnnnnnnnnnnnnnnnnnnnnnnnnnnnnnnnnnnnnnnnnnnnnnnnnnnnnnnnnnnnnnnnnnnnnnnnnnnnnnnnnnnnnnnnnnnnnnnnnnnnnnnnnnnnnnnnnnnnnnnnnnnnnnnnnnnnnnnnnnnnnnnnnnnnnnnnnnnnnnnnnnnnnnnnnnnnnnnnnnnnnnnnnnnnnnnnnnnnnnnnnnnnnnnnnnnnnnnnnnnnnnnnnnnnnnnnnnnnnnnnnnnnnnnnnnnnnnnnnnnnnnnnnnnnnnnnnnnnnnnnnnnnnnnnnnnnnnnnnnnnnnnnnnnnnnnnnnnnnnnnnnnnnnnnnnnnnnnnnnnnnnnnnnnnnnnnnnnnnnnnnnnnnnnnnnnnnnnnnnnnnnnnnnnnnnnnnnnnnnnnnnnnnnnnnnnnnnnnnnnnnnnnnnnnnnnnnnnnnnnnnnnnnnnnnnnnnnnnnnnnnnnnnnnnnnnnnnnnnnnnnnnnnnnnnnnnnnnnnnnnnnnnnnnnnnnnnnnnnnnnnnnnnnnnnnnnnnnnnnnnnnnnnnnnnnnnnnnnnnnnnnnnnnnnnnnnnnnnnnnnnnnnnnnnnnnnnnnnnnnnnnnnnnnnnnnnnnnnnnnnnnnnnnnnnnnnnnnnnnnnnnnnnnnnnnnnnnnnnnnnnnnnnnnnnnnnnnnnnnnnnnnnnnnnnnnnnnnnnnnnnnnnnnnnnnnnnnnnnnnnnnnnnnnnnnnnnnnnnnnnnnnnnnnnnnnnnnnnnnnnnnnnnnnnnnnnnnnnnnnnnnnnnnnnnnnnnnnnnnnnnnnnnnnnnnnnnnnnnnnnnnnnnnnnnnnnnnnnnnnnnnnnnnnnnnnnnnnnnnnnnnnnnnnnnnnnnnnnnnnnnnnnnnnnnnnnnnnnnnnnnnnnnnnnnnnnnnnnnnnnnnnnnnnnnnnnnnnnnnnnnnnnnnnnnnnnnnnnnnnnnnnnnnnnnnnnnnnnnnnnnnnnnnnnnnnnnnnnnnnnnnnnnnnnnnnnnnnnnnnnnnnnnnnnnnnnnnnnnnnnnnnnnnnnnnnnnnnnnnnnnnnnnnnnnnnnnnnnnnnnnnnnnnnnnnnnnnnnnnnnnnnnnnnnnnnnnnnnnnnnnnnnnnnnnnnnnnnnnnnnnnnnnnnnnnnnnnnnnnnnnnnnnnnnnnnnnnnnnnnnnnnnnnnnnnnnnnnnnnnnnnnnnnnnnnnnnnnnnnnnnnnnnnnnnnnnnnnnnnnnnnnnnnnnnnnnnnnnnnnnnnnnnnnnnnnnnnnnnnnnnnnnnnnnnnnnnnnnnnnnnnnnnnnnnnnnnnnnnnnnnnnnnnnnnnnnnnnnnnnnnnnnnnnnnnnnnnnnnnnnnnnnnnnnnnnnnnnnnnnnnnnnnnnnnnnnnnnnnnnnnnnnnnnnnnnnnnnnnnnnnnnnnnnnnnnnnnnnnnnnnnnnnnnnnnnnnnnnnnnnnnnnnnnnnnnnnnnnnnnnnnnnnnnnnnnnnnnnnnnnnnnnnnnnnnnnnnnnnnnnnnnnnnnnnnnnnnnnnnnnnnnnnnnnnnnnnnnnnnnnnnnnnnnnnnnnnnnnnnnnnnnnnnnnnnnnnnnnnnnnnnnnnnnnnnnnnnnnnnnnnnnnnnnnnnnnnnnnnnnnnnnnnnnnnnnnnnnnnnnnnnnnnnnnnnnnnnnnnnnnnnnnnnnnnnnnnnnnnnnnnnnnnnnnnnnnnnnnnnnnnnnnnnnnnnnnnnnnnnnnnnnnnnnnnnnnnnnnnnnnnnnnnnnnnnnnnnnnnnnnnnnnnnnnnnnnnnnnnnnnnnnnnnnnnnnnnnnnnnnnnnnnnnnnnnnnnnnnnnnnnnnnnnnnnnnnnnnnnnnnnnnnnnnnnnnnnnnnnnnnnnnnnnnnnnnnnnnnnnnnnnnnnnnnnnnnnnnnnnnnnnnnnnnnnnnnnnnnnnnnnnnnnnnnnnnnnnnnnnnnnnnnnnnnnnnnnnnnnnnnnnnnnnnnnnnnnnnnnnnnnnnnnnnnnnnnnnnnnnnnnnnnnnnnnnnnnnnnnnnnnnnnnnnnnnnnnnnnnnnnnnnnnnnnnnnnnnnnnnnnnnnnnnnnnnnnnnnnnnnnnnnnnnnnnnnnnnnnnnnnnnnnnnnnnnnnnnnnnnnnnnnnnnnnnnnnnnnnnnnnnnnnnnnnnnnnnnnnnnnnnnnnnnnnnnnnnnnnnnnnnnnnnnnnnnnnnnnnnnnnnnnnnnnnnnnnnnnnnnnnnnnnnnnnnnnnnnnnnnnnnnnnnnnnnnnnnnnnnnnnnnnnnnnnnnnnnnnnnnnnnnnnnnnnnnnnnnnnnnnnnnnnnnnnnnnnnnnnnnnnnnnnnnnnnnnnnnnnnnnnnnnnnnnnnnnnnnnnnnnnnnnnnnnnnnnnnnnnnnnnnnnnnnnnnnnnnnnnnnnnnnnnnnnnnnnnnnnnnnnnnnnnnnnnnnnnnnnnnnnnnnnnnnnnnnnnnnnnnnnnnnnnnnnnnnnnnnnnnnnnnnnnnnnnnnnnnnnnnnnnnnnnnnnnnnnnnnnnnnnnnnnnnnnnnnnnnnnnnnnnnnnnnnnnnnnnnnnnnnnnnnnnnnnnnnnnnnnnnnnnnnnnnnnnnnnnnnnnnnnnnnnnnnnnnnnnnnnnnnnnnnnnnnnnnnnnnnnnnnnnnnnnnnnnnnnnnnnnnnnnnnnnnnnnnnnnnnnnnnnnnnnnnnnnnnnnnnnnnnnnnnnnnnnnnnnnnnnnnnnnnnnnnnnnnnnnnnnnnnnnnnnnnnnnnnnnnnnnnnnnnnnnnnnnnnnnnnnnnnnnnnnnnnnnnnnnnnnnnnnnnnnnnnnnnnnnnnnnnnnnnnnnnnnnnnnnnnnnnnnnnnnnnnnnnnnnnnnnnnnnnnnnnnnnnnnnnnnnnnnnnnnnnnnnnnnnnnnnnnnnnnnnnnnnnnnnnnnnnnnnnnnnnnnnnnnnnnnnnnnnnnnnnnnnnnnnnnnnnnnnnnnnnnnnnnnnnnnnnnnnnnnnnnnnnnnnnnnnnnnnnnnnnnnnnnnnnnnnnnnnnnnnnnnnnnnnnnnnnnnnnnnnnnnnnnnnnnnnnnnnnnnnnnnnnnnnnnnnnnnnnnnnnnnnnnnnnnnnnnnnnnnnnnnnnnnnnnnnnnnnnnnnnnnnnnnnnnnnnnnnnnnnnnnnnnnnnnnnnnnnnnnnnnnnnnnnnnnnnnnnnnnnnnnnnnnnnnnnnnnnnnnnnnnnnnnnnnnnnnnnnnnnnnnnnnnnnnnnnnnnnnnnnnnnnnnnnnnnnnnnnnnnnnnnnnnnnnnnnnnnnnnnnnnnnnnnnnnnnnnnnnnnnnnnnnnnnnnnnnnnnnnnnnnnnnnnnnnnnnnnnnnnnnnnnnnnnnnnnnnnnnnnnnnnnnnnnnnnnnnnnnnnnnnnnnnnnnnnnnnnnnnnnnnnnnnnnnnnnnnnnnnnnnnnnnnnnnnnnnnnnnnnnnnnnnnnnnnnnnnnnnnnnnnnnnnnnnnnnnnnnnnnnnnnnnnnnnnnnnnnnnnnnnnnnnnnnnnnnnnnnnnnnnnnnnnnnnnnnnnnnnnnnnnnnnnnnnnnnnnnnnnnnnnnnnnnnnnnnnnnnnnnnnnnnnnnnnnnnnnnnnnnnnnnnnnnnnnnnnnnnnnnnnnnnnnnnnnnnnnnnnnnnnnnnnnnnnnnnnnnnnnnnnnnnnnnnnnnnnnnnnnnnnnnnnnnnnnnnnnnnnnnnnnnnnnnnnnnnnnnnnnnnnnnnnnnnnnnnnnnnnnnnnnnnnnnnnnnnnnnnnnnnnnnnnnnnnnnnnnnnnnnnnnnnnnnnnnnnnnnnnnnnnnnnnnnnnnnnnnnnnnnnnnnnnnnnnnnnnnnnnnnnnnnnnnnnnnnnnnnnnnnnnnnnnnnnnnnnnnnnnnnnnnnnnnnnnnnnnnnnnnnnnnnnnnnnnnnnnnnnnnnnnnnnnnnnnnnnnnnnnnnnnnnnnnnnnnnnnnnnnnnnnnnnnnnnnnnnnnnnnnnnnnnnnnnnnnnnnnnnnnnnnnnnnnnnnnnnnnnnnnnnnnnnnnnnnnnnnnnnnnnnnnnnnnnnnnnnnnnnnnnnnnnnnnnnnnnnnnnnnnnnnnnnnnnnnnnnnnnnnnnnnnnnnnnnnnnnnnnnnnnnnnnnnnnnnnnnnnnnnnnnnnnnnnnnnnnnnnnnnnnnnnnnnnnnnnnnnnnnnnnnnnnnnnnnnnnnnnnnnnnnnnnnnnnnnnnnnnnnnnnnnnnnnnnnnnnnnnnnnnnnnnnnnnnnnnnnnnnnnnnnnnnnnnnnnnnnnnnnnnnnnnnnnnnnnnnnnnnnnnnnnnnnnnnnnnnnnnnnnnnnnnnnnnnnnnnnnnnnnnnnnnnnnnnnnnnnnnnnnnnnnnnnnnnnnnnnnnnnnnnnnnnnnnnnnnnnnnnnnnnnnnnnnnnnnnnnnnnnnnnnnnnnnnnnnnnnnnnnnnnnnnnnnnnnnnnnnnnnnnnnnnnnnnnnnnnnnnnnnnnnnnnnnnnnnnnnnnnnnnnnnnnnnnnnnnnnnnnnnnnnnnnnnnnnnnnnnnnnnnnnnnnnnnnnnnnnnnnnnnnnnnnnnnnnnnnnnnnnnnnnnnnnnnnnnnnnnnnnnnnnnnnnnnnnnnnnnnnnnnnnnnnnnnnnnnnnnnnnnnnnnnnnnnnnnnnnnnnnnnnnnnnnnnnnnnnnnnnnnnnnnnnnnnnnnnnnnnnnnnnnnnnnnnnnnnnnnnnnnnnnnnnnnnnnnnnnnnnnnnnnnnnnnnnnnnnnnnnnnnnnnnnnnnnnnnnnnnnnnnnnnnnnnnnnnnnnnnnnnnnnnnnnnnnnnnnnnnnnnnnnnnnnnnnnnnnnnnnnnnnnnnnnnnnnnnnnnnnnnnnnnnnnnnnnnnnnnnnnnnnnnnnnnnnnnnnnnnnnnnnnnnnnnnnnnnnnnnnnnnnnnnnnnnnnnnnnnnnnnnnnnnnnnnnnnnnnnnnnnnnnnnnnnnnnnnnnnnnnnnnnnnnnnnnnnnnnnnnnnnnnnnnnnnnnnnnnnnnnnnnnnnnnnnnnnnnnnnnnnnnnnnnnnnnnnnnnnnnnnnnnnnnnnnnnnnnnnnnnnnnnnnnnnnnnnnnnnnnnnnnnnnnnnnnnnnnnnnnnnnnnnnnnnnnnnnnnnnnnnnnnnnnnnnnnnnnnnnnnnnnnnnnnnnnnnnnnnnnnnnnnnnnnnnnnnnnnnnnnnnnnnnnnnnnnnnnnnnnnnnnnnnnnnnnnnnnnnnnnnnnnnnnnnnnnnnnnnnnnnnnnnnnnnnnnnnnnnnnnnnnnnnnnnnnnnnnnnnnnnnnnnnnnnnnnnnnnnnnnnnnnnnnnnnnnnnnnnnnnnnnnnnnnnnnnnnnnnnnnnnnnnnnnnnnnnnnnnnnnnnnnnnnnnnnnnnnnnnnnnnnnnnnnnnnnnnnnnnnnnnnnnnnnnnnnnnnnnnnnnnnnnnnnnnnnnnnnnnnnnnnnnnnnnnnnnnnnnnnnnnnnnnnnnnnnnnnnnnnnnnnnnnnnnnnnnnnnnnnnnnnnnnnnnnnnnnnnnnnnnnnnnnnnnnnnnnnnnnnnnnnnnnnnnnnnnnnnnnnnnnnnnnnnnnnnnnnnnnnnnnnnnnnnnnnnnnnnnnnnnnnnnnnnnnnnnnnnnnnnnnnnnnnnnnnnnnnnnnnnnnnnnnnnnnnnnnnnnnnnnnnnnnnnnnnnnnnnnnnnnnnnnnnnnnnnnnnnnnnnnnnnnnnnnnnnnnnnnnnnnnnnnnnnnnnnnnnnnnnnnnnnnnnnnnnnnnnnnnnnnnnnnnnnnnnnnnnnnnnnnnnnnnnnnnnnnnnnnnnnnnnnnnnnnnnnnnnnnnnnnnnnnnnnnnnnnnnnnnnnnnnnnnnnnnnnnnnnnnnnnnnnnnnnnnnnnnnnnnnnnnnnnnnnnnnnnnnnnnnnnnnnnnnnnnnnnnnnnnnnnnnnnnnnnnnnnnnnnnnnnnnnnnnnnnnnnnnnnnnnnnnnnnnnnnnnnnnnnnnnnnnnnnnnnnnnnnnnnnnnnnnnnnnnnnnnnnnnnnnnnnnnnnnnnnnnnnnnnnnnnnnnnnnnnnnnnnnnnnnnnnnnnnnnnnnnnnnnnnnnnnnnnnnnnnnnnnnnnnnnnnnnnnnnnnnnnnnnnnnnnnnnnnnnnnnnnnnnnnnnnnnnnnnnnnnnnnnnnnnnnnnnnnnnnnnnnnnnnnnnnnnnnnnnnnnnnnnnnnnnnnnnnnnnnnnnnnnnnnnnnnnnnnnnnnnnnnnnnnnnnnnnnnnnnnnnnnnnnnnnnnnnnnnnnnnnnnnnnnnnnnnnnnnnnnnnnnnnnnnnnnnnnnnnnnnnnnnnnnnnnnnnnnnnnnnnnnnnnnnnnnnnnnnnnnnnnnnnnnnnnnnnnnnnnnnnnnnnnnnnnnnnnnnnnnnnnnnnnnnnnnnnnnnnnnnnnnnnnnnnnnnnnnnnnnnnnnnnnnnnnnnnnnnnnnnnnnnnnnnnnnnnnnnnnnnnnnnnnnnnnnnnnnnnnnnnnnnnnnnnnnnnnnnnnnnnnnnnnnnnnnnnnnnnnnnnnnnnnnnnnnnnnnnnnnnnnnnnnnnnnnnnnnnnnnnnnnnnnnnnnnnnnnnnnnnnnnnnnnnnnnnnnnnnnnnnnnnnnnnnnnnnnnnnnnnnnnnnnnnnnnnnnnnnnnnnnnnnnnnnnnnnnnnnnnnnnnnnnnnnnnnnnnnnnnnnnnnnnnnnnnnnnnnnnnnnnnnnnnnnnnnnnnnnnnnnnnnnnnnnnnnnnnnnnnnnnnnnnnnnnnnnnnnnnnnnnnnnnnnnnnnnnnnnnnnnnnnnnnnnnnnnnnnnnnnnnnnnnnnnnnnnnnnnnnnnnnnnnnnnnnnnnnnnnnnnnnnnnnnnnnnnnnnnnnnnnnnnnnnnnnnnnnnnnnnnnnnnnnnnnnnnnnnnnnnnnnnnnnnnnnnnnnnnnnnnnnnnnnnnnnnnnnnnnnnnnnnnnnnnnnnnnnnnnnnnnnnnnnnnnnnnnnnnnnnnnnnnnnnnnnnnnnnnnnnnnnnnnnnnnnnnnnnnnnnnnnnnnnnnnnnnnnnnnnnnnnnnnnnnnnnnnnnnnnnnnnnnnnnnnnnnnnnnnnnnnnnnnnnnnnnnnnnnnnnnnnnnnnnnnnnnnnnnnnnnnnnnnnnnnnnnnnnnnnnnnnnnnnnnnnnnnnnnnnnnnnnnnnnnnnnnnnnnnnnnnnnnnnnnnnnnnnnnnnnnnnnnnnnnnnnnnnnnnnnnnnnnnnnnnnnnnnnnnnnnnnnnnnnnnnnnnnnnnnnnnnnnnnnnnnnnnnnnnnnnnnnnnnnnnnnnnnnnnnnnnnnnnnnnnnnnnnnnnnnnnnnnnnnnnnnnnnnnnnnnnnnnnnnnnnnnnnnnnnnnnnnnnnnnnnnnnnnnnnnnnnnnnnnnnnnnnnnnnnnnnnnnnnnnnnnnnnnnnnnnnnnnnnnnnnnnnnnnnnnnnnnnnnnnnnnnnnnnnnnnnnnnnnnnnnnnnnnnnnnnnnnnnnnnnnnnnnnnnnnnnnnnnnnnnnnnnnnnnnnnnnnnnnnnnnnnnnnnnnnnnnnnnnnnnnnnnnnnnnnnnnnnnnnnnnnnnnnnnnnnnnnnnnnnnnnnnnnnnnnnnnnnnnnnnnnnnnnnnnnnnnnnnnnnnnnnnnnnnnnnnnnnnnnnnnnnnnnnnnnnnnnnnnnnnnnnnnnnnnnnnnnnnnnnnnnnnnnnnnnnnnnnnnnnnnnnnnnnnnnnnnnnnnnnnnnnnnnnnnnnnnnnnnnnnnnnnnnnnnnnnnnnnnnnnnnnnnnnnnnnnnnnnnnnnnnnnnnnnnnnnnnnnnnnnnnnnnnnnnnnnnnnnnnnnnnnnnnnnnnnnnnnnnnnnnnnnnnnnnnnnnnnnnnnnnnnnnnnnnnnnnnnnnnnnnnnnnnnnnnnnnnnnnnnnnnnnnnnnnnnnnnnnnnnnnnnnnnnnnnnnnnnnnnnnnnnnnnnnnnnnnnnnnnnnnnnnnnnnnnnnnnnnnnnnnnnnnnnnnnnnnnnnnnnnnnnnnnnnnnnnnnnnnnnnnnnnnnnnnnnnnnnnnnnnnnnnnnnnnnnnnnnnnnnnnnnnnnnnnnnnnnnnnnnnnnnnnnnnnnnnnnnnnnnnnnnnnnnnnnnnnnnnnnnnnnnnnnnnnnnnnnnnnnnnnnnnnnnnnnnnnnnnnnnnnnnnnnnnnnnnnnnnnnnnnnnnnnnnnnnnnnnnnnnnnnnnnnnnnnnnnnnnnnnnnnnnnnnnnnnnnnnnnnnnnnnnnnnnnnnnnnnnnnnnnnnnnnnnnnnnnnnnnnnnnnnnnnnnnnnnnnnnnnnnnnnnnnnnnnnnnnnnnnnnnnnnnnnnnnnnnnnnnnnnnnnnnnnnnnnnnnnnnnnnnnnnnnnnnnnnnnnnnnnnnnnnnnnnnnnnnnnnnnnnnnnnnnnnnnnnnnnnnnnnnnnnnnnnnnnnnnnnnnnnnnnnnnnnnnnnnnnnnnnnnnnnnnnnnnnnnnnnnnnnnnnnnnnnnnnnnnnnnnnnnnnnnnnnnnnnnnnnnnnnnnnnnnnnnnnnnnnnnnnnnnnnnnnnnnnnnnnnnnnnnnnnnnnnnnnnnnnnnnnnnnnnnnnnnnnnnnnnnnnnnnnnnnnnnnnnnnnnnnnnnnnnnnnnnnnnnnnnnnnnnnnnnnnnnnnnnnnnnnnnnnnnnnnnnnnnnnnnnnnnnnnnnnnnnnnnnnnnnnnnnnnnnnnnnnnnnnnnnnnnnnnnnnnnnnnnnnnnnnnnnnnnnnnnnnnnnnnnnnnnnnnnnnnnnnnnnnnnnnnnnnnnnnnnnnnnnnnnnnnnnnnnnnnnnnnnnnnnnnnnnnnnnnnnnnnnnnnnnnnnnnnnnnnnnnnnnnnnnnnnnnnnnnnnnnnnnnnnnnnnnnnnnnnnnnnnnnnnnnnnnnnnnnnnnnnnnnnnnnnnnnnnnnnnnnnnnnnnnnnnnnnnnnnnnnnnnnnnnnnnnnnnnnnnnnnnnnnnnnnnnnnnnnnnnnnnnnnnnnnnnnnnnnnnnnnnnnnnnnnnnnnnnnnnnnnnnnnnnnnnnnnnnnnnnnnnnnnnnnnnnnnnnnnnnnnnnnnnnnnnnnnnnnnnnnnnnnnnnnnnnnnnnnnnnnnnnnnnnnnnnnnnnnnnnnnnnnnnnnnnnnnnnnnnnnnnnnnnnnnnnnnnnnnnnnnnnnnnnnnnnnnnnnnnnnnnnnnnnnnnnnnnnnnnnnnnnnnnnnnnnnnnnnnnnnnnnnnnnnnnnnnnnnnnnnnnnnnnnnnnnnnnnnnnnnnnnnnnnnnnnnnnnnnnnnnnnnnnnnnnnnnnnnnnnnnnnnnnnnnnnnnnnnnnnnnnnnnnnnnnnnnnnnnnnnnnnnnnnnnnnnnnnnnnnnnnnnnnnnnnnnnnnnnnnnnnnnnnnnnnnnnnnnnnnnnnnnnnnnnnnnnnnnnnnnnnnnnnnnnnnnnnnnnnnnnnnnnnnnnnnnnnnnnnnnnnnnnnnnnnnnnnnnnnnnnnnnnnnnnnnnnnnnnnnnnnnnnnnnnnnnnnnnnnnnnnnnnnnnnnnnnnnnnnnnnnnnnnnnnnnnnnnnnnnnnnnnnnnnnnnnnnnnnnnnnnnnnnnnnnnnnnnnnnnnnnnnnnnnnnnnnnnnnnnnnnnnnnnnnnnnnnnnnnnnnnnnnnnnnnnnnnnnnnnnnnnnnnnnnnnnnnnnnnnnnnnnnnnnnnnnnnnnnnnnnnnnnnnnnnnnnnnnnnnnnnnnnnnnnnnnnnnnnnnnnnnnnnnnnnnnnnnnnnnnnnnnnnnnnnnnnnnnnnnnnnnnnnnnnnnnnnnnnnnnnnnnnnnnnnnnnnnnnnnnnnnnnnnnnnnnnnnnnnnnnnnnnnnnnnnnnnnnnnnnnnnnnnnnnnnnnnnnnnnnnnnnnnnnnnnnnnnnnnnnnnnnnnnnnnnnnnnnnnnnnnnnnnnnnnnnnnnnnnnnnnnnnnnnnnnnnnnnnnnnnnnnnnnnnnnnnnnnnnnnnnnnnnnnnnnnnnnnnnnnnnnnnnnnnnnnnnnnnnnnnnnnnnnnnnnnnnnnnnnnnnnnnnnnnnnnnnnnnnnnnnnnnnnnnnnnnnnnnnnnnnnnnnnnnnnnnnnnnnnnnnnnnnnnnnnnnnnnnnnnnnnnnnnnnnnnnnnnnnnnnnnnnnnnnnnnnnnnnnnnnnnnnnnnnnnnnnnnnnnnnnnnnnnnnnnnnnnnnnnnnnnnnnnnnnnnnnnnnnnnnnnnnnnnnnnnnnnnnnnnnnnnnnnnnnnnnnnnnnnnnnnnnnnnnnnnnnnnnnnnnnnnnnnnnnnnnnnnnnnnnnnnnnnnnnnnnnnnnnnnnnnnnnnnnnnnnnnnnnnnnnnnnnnnnnnnnnnnnnnnnnnnnnnnnnnnnnnnnnnnnnnnnnnnnnnnnnnnnnnnnnnnnnnnnnnnnnnnnnnnnnnnnnnnnnnnnnnnnnnnnnnnnnnnnnnnnnnnnnnnnnnnnnnnnnnnnnnnnnnnnnnnnnnnnnnnnnnnnnnnnnnnnnnnnnnnnnnnnnnnnnnnnnnnnnnnnnnnnnnnnnnnnnnnnnnnnnnnnnnnnnnnnnnnnnnnnnnnnnnnnnnnnnnnnnnnnnnnnnnnnnnnnnnnnnnnnnnnnnnnnnnnnnnnnnnnnnnnnnnnnnnnnnnnnnnnnnnnnnnnnnnnnnnnnnnnnnnnnnnnnnnnnnnnnnnnnnnnnnnnnnnnnnnnnnnnnnnnnnnnnnnnnnnnnnnnnnnnnnnnnnnnnnnnnnnnnnnnnnnnnnnnnnnnnnnnnnnnnnnnnnnnnnnnnnnnnnnnnnnnnnnnnnnnnnnnnnnnnnnnnnnnnnnnnnnnnnnnnnnnnnnnnnnnnnnnnnnnnnnnnnnnnnnnnnnnnnnnnnnnnnnnnnnnnnnnnnnnnnnnnnnnnnnnnnnnnnnnnnnnnnnnnnnnnnnnnnnnnnnnnnnnnnnnnnnnnnnnnnnnnnnnnnnnnnnnnnnnnnnnnnnnnnnnnnnnnnnnnnnnnnnnnnnnnnnnnnnnnnnnnnnnnnnnnnnnnnnnnnnnnnnnnnnnnnnnnnnnnnnnnnnnnnnnnnnnnnnnnnnnnnnnnnnnnnnnnnnnnnnnnnnnnnnnnnnnnnnnnnnnnnnnnnnnnnnnnnnnnnnnnnnnnnnnnnnnnnnnnnnnnnnnnnnnnnnnnnnnnnnnnnnnnnnnnnnnnnnnnnnnnnnnnnnnnnnnnnnnnnnnnnnnnnnnnnnnnnnnnnnnnnnnnnnnnnnnnnnnnnnnnnnnnnnnnnnnnnnnnnnnnnnnnnnnnnnnnnnnnnnnnnnnnnnnnnnnnnnnnnnnnnnnnnnnnnnnnnnnnnnnnnnnnnnnnnnnnnnnnnnnnnnnnnnnnnnnnnnnnnnnnnnnnnnnnnnnnnnnnnnnnnnnnnnnnnnnnnnnnnnnnnnnnnnnnnnnnnnnnnnnnnnnnnnnnnnnnnnnnnnnnnnnnnnnnnnnnnnnnnnnnnnnnnnnnnnnnnnnnnnnnnnnnnnnnnnnnnnnnnnnnnnnnnnnnnnnnnnnnnnnnnnnnnnnnnnnnnnnnnnnnnnnnnnnnnnnnnnnnnnnnnnnnnnnnnnnnnnnnnnnnnnnnnnnnnnnnnnnnnnnnnnnnnnnnnnnnnnnnnnnnnnnnnnnnnnnnnnnnnnnnnnnnnnnnnnnnnnnnnnnnnnnnnnnnnnnnnnnnnnnnnnnnnnnnnnnnnnnnnnnnnnnnnnnnnnnnnnnnnnnnnnnnnnnnnnnnnnnnnnnnnnnnnnnnnnnnnnnnnnnnnnnnnnnnnnnnnnnnnnnnnnnnnnnnnnnnnnnnnnnnnnnnnnnnnnnnnnnnnnnnnnnnnnnnnnnnnnnnnnnnnnnnnnnnnnnnnnnnnnnnnnnnnnnnnnnnnnnnnnnnnnnnnnnnnnnnnnnnnnnnnnnnnnnnnnnnnnnnnnnnnnnnnnnnnnnnnnnnnnnnnnnnnnnnnnnnnnnnnnnnnnnnnnnnnnnnnnnnnnnnnnnnnnnnnnnnnnnnnnnnnnnnnnnnnnnnnnnnnnnnnnnnnnnnnnnnnnnnnnnnnnnnnnnnnnnnnnnnnnnnnnnnnnnnnnnnnnnnnnnnnnnnnnnnnnnnnnnnnnnnnnnnnnnnnnnnnnnnnnnnnnnnnnnnnnnnnnnnnnnnnnnnnnnnnnnnnnnnnnnnnnnnnnnnnnnnnnnnnnnnnnnnnnnnnnnnnnnnnnnnnnnnnnnnnnnnnnnnnnnnnnnnnnnnnnnnnnnnnnnnnnnnnnnnnnnnnnnnnnnnnnnnnnnnnnnnnnnnnnnnnnnnnnnnnnnnnnnnnnnnnnnnnnnnnnnnnnnnnnnnnnnnnnnnnnnnnnnnnnnnnnnnnnnnnnnnnnnnnnnnnnnnnnnnnnnnnnnnnnnnnnnnnnnnnnnnnnnnnnnnnnnnnnnnnnnnnnnnnnnnnnnnnnnnnnnnnnnnnnnnnnnnnnnnnnnnnnnnnnnnnnnnnnnnnnnnnnnnnnnnnnnnnnnnnnnnnnnnnnnnnnnnnnnnnnnnnnnnnnnnnnnnnnnnnnnnnnnnnnnnnnnnnnnnnnnnnnnnnnnnnnnnnnnnnnnnnnnnnnnnnnnnnnnnnnnnnnnnnnnnnnnnnnnnnnnnnnnnnnnnnnnnnnnnnnnnnnnnnnnnnnnnnnnnnnnnnnnnnnnnnnnnnnnnnnnnnnnnnnnnnnnnnnnnnnnnnnnnnnnnnnnnnnnnnnnnnnnnnnnnnnnnnnnnnnnnnnnnnnnnnnnnnnnnnnnnnnnnnnnnnnnnnnnnnnnnnnnnnnnnnnnnnnnnnnnnnnnnnnnnnnnnnnnnnnnnnnnnnnnnnnnnnnnnnnnnnnnnnnnnnnnnnnnnnnnnnnnnnnnnnnnnnnnnnnnnnnnnnnnnnnnnnnnnnnnnnnnnnnnnnnnnnnnnnnnnnnnnnnnnnnnnnnnnnnnnnnnnnnnnnnnnnnnnnnnnnnnnnnnnnnnnnnnnnnnnnnnnnnnnnnnnnnnnnnnnnnnnnnnnnnnnnnnnnnnnnnnnnnnnnnnnnnnnnnnnnnnnnnnnnnnnnnnnnnnnnnnnnnnnnnnnnnnnnnnnnnnnnnnnnnnnnnnnnnnnnnnnnnnnnnnnnnnnnnnnnnnnnnnnnnnnnnnnnnnnnnnnnnnnnnnnnnnnnnnnnnnnnnnnnnnnnnnnnnnnnnnnnnnnnnnnnnnnnnnnnnnnnnnnnnnnnnnnnnnnnnnnnnnnnnnnnnnnnnnnnnnnnnnnnnnnnnnnnnnnnnnnnnnnnnnnnnnnnnnnnnnnnnnnnnnnnnnnnnnnnnnnnnnnnnnnnnnnnnnnnnnnnnnnnnnnnnnnnnnnnnnnnnnnnnnnnnnnnnnnnnnnnnnnnnnnnnnnnnnnnnnnnnnnnnnnnnnnnnnnnnnnnnnnnnnnnnnnnnnnnnnnnnnnnnnnnnnnnnnnnnnnnnnnnnnnnnnnnnnnnnnnnnnnnnnnnnnnnnnnnnnnnnnnnnnnnnnnnnnnnnnnnnnnnnnnnnnnnnnnnnnnnnnnnnnnnnnnnnnnnnnnnnnnnnnnnnnnnnnnnnnnnnnnnnnnnnnnnnnnnnnnnnnnnnnnnnnnnnnnnnnnnnnnnnnnnnnnnnnnnnnnnnnnnnnnnnnnnnnnnnnnnnnnnnnnnnnnnnnnnnnnnnnnnnnnnnnnnnnnnnnnnnnnnnnnnnnnnnnnnnnnnnnnnnnnnnnnnnnnnnnnnnnnnnnnnnnnnnnnnnnnnnnnnnnnnnnnnnnnnnnnnnnnnnnnnnnnnnnnnnnnnnnnnnnnnnnnnnnnnnnnnnnnnnnnnnnnnnnnnnnnnnnnnnnnnnnnnnnnnnnnnnnnnnnnnnnnnnnnnnnnnnnnnnnnnnnnnnnnnnnnnnnnnnnnnnnnnnnnnnnnnnnnnnnnnnnnnnnnnnnnnnnnnnnnnnnnnnnnnnnnnnnnnnnnnnnnnnnnnnnnnnnnnnnnnnnnnnnnnnnnnnnnnnnnnnnnnnnnnnnnnnnnnnnnnnnnnnnnnnnnnnnnnnnnnnnnnnnnnnnnnnnnnnnnnnnnnnnnnnnnnnnnnnnnnnnnnnnnnnnnnnnnnnnnnnnnnnnnnnnnnnnnnnnnnnnnnnnnnnnnnnnnnnnnnnnnnnnnnnnnnnnnnnnnnnnnnnnnnnnnnnnnnnnnnnnnnnnnnnnnnnnnnnnnnnnnnnnnnnnnnnnnnnnnnnnnnnnnnnnnnnnnnnnnnnnnnnnnnnnnnnnnnnnnnnnnnnnnnnnnnnnnnnnnnnnnnnnnnnnnnnnnnnnnnnnnnnnnnnnnnnnnnnnnnnnnnnnnnnnnnnnnnnnnnnnnnnnnnnnnnnnnnnnnnnnnnnnnnnnnnnnnnnnnnnnnnnnnnnnnnnnnnnnnnnnnnnnnnnnnnnnnnnnnnnnnnnnnnnnnnnnnnnnnnnnnnnnnnnnnnnnnnnnnnnnnnnnnnnnnnnnnnnnnnnnnnnnnnnnnnnnnnnnnnnnnnnnnnnnnnnnnnnnnnnnnnnnnnnnnnnnnnnnnnnnnnnnnnnnnnnnnnnnnnnnnnnnnnnnnnnnnnnnnnnnnnnnnnnnnnnnnnnnnnnnnnnnnnnnnnnnnnnnnnnnnnnnnnnnnnnnnnnnnnnnnnnnnnnnnnnnnnnnnnnnnnnnnnnnnnnnnnnnnnnnnnnnnnnnnnnnnnnnnnnnnnnnnnnnnnnnnnnnnnnnnnnnnnnnnnnnnnnnnnnnnnnnnnnnnnnnnnnnnnnnnnnnnnnnnnnnnnnnnnnnnnnnnnnnnnnnnnnnnnnnnnnnnnnnnnnnnnnnnnnnnnnnnnnnnnnnnnnnnnnnnnnnnnnnnnnnnnnnnnnnnnnnnnnnnnnnnnnnnnnnnnnnnnnnnnnnnnnnnnnnnnnnnnnnnnnnnnnnnnnnnnnnnnnnnnnnnnnnnnnnnnnnnnnnnnnnnnnnnnnnnnnnnnnnnnnnnnnnnnnnnnnnnnnnnnnnnnnnnnnnnnnnnnnnnnnnnnnnnnnnnnnnnnnnnnnnnnnnnnnnnnnnnnnnnnnnnnnnnnnnnnnnnnnnnnnnnnnnnnnnnnnnnnnnnnnnnnnnnnnnnnnnnnnnnnnnnnnnnnnnnnnnnnnnnnnnnnnnnnnnnnnnnnnnnnnnnnnnnnnnnnnnnnnnnnnnnnnnnnnnnnnnnnnnnnnnnnnnnnnnnnnnnnnnnnnnnnnnnnnnnnnnnnnnnnnnnnnnnnnnnnnnnnnnnnnnnnnnnnnnnnnnnnnnnnnnnnnnnnnnnnnnnnnnnnnnnnnnnnnnnnnnnnnnnnnnnnnnnnnnnnnnnnnnnnnnnnnnnnnnnnnnnnnnnnnnnnnnnnnnnnnnnnnnnnnnnnnnnnnnnnnnnnnnnnnnnnnnnnnnnnnnnnnnnnnnnnnnnnnnnnnnnnnnnnnnnnnnnnnnnnnnnnnnnnnnnnnnnnnnnnnnnnnnnnnnnnnnnnnnnnnnnnnnnnnnnnnnnnnnnnnnnnnnnnnnnnnnnnnnnnnnnnnnnnnnnnnnnnnnnnnnnnnnnnnnnnnnnnnnnnnnnnnnnnnnnnnnnnnnnnnnnnnnnnnnnnnnnnnnnnnnnnnnnnnnnnnnnnnnnnnnnnnnnnnnnnnnnnnnnnnnnnnnnnnnnnnnnnnnnnnnnnnnnnnnnnnnnnnnnnnnnnnnnnnnnnnnnnnnnnnnnnnnnnnnnnnnnnnnnnnnnnnnnnnnnnnnnnnnnnnnnnnnnnnnnnnnnnnnnnnnnnnnnnnnnnnnnnnnnnnnnnnnnnnnnnnnnnnnnnnnnnnnnnnnnnnnnnnnnnnnnnnnnnnnnnnnnnnnnnnnnnnnnnnnnnnnnnnnnnnnnnnnnnnnnnnnnnnnnnnnnnnnnnnnnnnnnnnnnnnnnnnnnnnnnnnnnnnnnnnnnnnnnnnnnnnnnnnnnnnnnnnnnnnnnnnnnnnnnnnnnnnnnnnnnnnnnnnnnnnnnnnnnnnnnnnnnnnnnnnnnnnnnnnnnnnnnnnnnnnnnnnnnnnnnnnnnnnnnnnnnnnnnnnnnnnnnnnnnnnnnnnnnnnnnnnnnnnnnnnnnnnnnnnnnnnnnnnnnnnnnnnnnnnnnnnnnnnnnnnnnnnnnnnnnnnnnnnnnnnnnnnnnnnnnnnnnnnnnnnnnnnnnnnnnnnnnnnnnnnnnnnnnnnnnnnnnnnnnnnnnnnnnnnnnnnnnnnnnnnnnnnnnnnnnnnnnnnnnnnnnnnnnnnnnnnnnnnnnnnnnnnnnnnnnnnnnnnnnnnnnnnnnnnnnnnnnnnnnnnnnnnnnnnnnnnnnnnnnnnnnnnnnnnnnnnnnnnnnnnnnnnnnnnnnnnnnnnnnnnnnnnnnnnnnnnnnnnnnnnnnnnnnnnnnnnnnnnnnnnnnnnnnnnnnnnnnnnnnnnnnnnnnnnnnnnnnnnnnnnnnnnnnnnnnnnnnnnnnnnnnnnnnnnnnnnnnnnnnnnnnnnnnnnnnnnnnnnnnnnnnnnnnnnnnnnnnnnnnnnnnnnnnnnnnnnnnnnnnnnnnnnnnnnnnnnnnnnnnnnnnnnnnnnnnnnnnnnnnnnnnnnnnnnnnnnnnnnnnnnnnnnnnnnnnnnnnnnnnnnnnnnnnnnnnnnnnnnnnnnnnnnnnnnnnnnnnnnnnnnnnnnnnnnnnnnnnnnnnnnnnnnnnnnnnnnnnnnnnnnnnnnnnnnnnnnnnnnnnnnnnnnnnnnnnnnnnnnnnnnnnnnnnnnnnnnnnnnnnnnnnnnnnnnnnnnnnnnnnnnnnnnnnnnnnnnnnnnnnnnnnnnnnnnnnnnnnnnnnnnnnnnnnnnnnnnnnnnnnnnnnnnnnnnnnnnnnnnnnnnnnnnnnnnnnnnnnnnnnnnnnnnnnnnnnnnnnnnnnnnnnnnnnnnnnnnnnnnnnnnnnnnnnnnnnnnnnnnnnnnnnnnnnnnnnnnnnnnnnnnnnnnnnnnnnnnnnnnnnnnnnnnnnnnnnnnnnnnnnnnnnnnnnnnnnnnnnnnnnnnnnnnnnnnnnnnnnnnnnnnnnnnnnnnnnnnnnnnnnnnnnnnnnnnnnnnnnnnnnnnnnnnnnnnnnnnnnnnnnnnnnnnnnnnnnnnnnnnnnnnnnnnnnnnnnnnnnnnnnnnnnnnnnnnnnnnnnnnnnnnnnnnnnnnnnnnnnnnnnnnnnnnnnnnnnnnnnnnnnnnnnnnnnnnnnnnnnnnnnnnnnnnnnnnnnnnnnnnnnnnnnnnnnnnnnnnnnnnnnnnnnnnnnnnnnnnnnnnnnnnnnnnnnnnnnnnnnnnnnnnnnnnnnnnnnnnnnnnnnnnnnnnnnnnnnnnnnnnnnnnnnnnnnnnnnnnnnnnnnnnnnnnnnnnnnnnnnnnnnnnnnnnnnnnnnnnnnnnnnnnnnnnnnnnnnnnnnnnnnnnnnnnnnnnnnnnnnnnnnnnnnnnnnnnnnnnnnnnnnnnnnnnnnnnnnnnnnnnnnnnnnnnnnnnnnnnnnnnnnnnnnnnnnnnnnnnnnnnnnnnnnnnnnnnnnnnnnnnnnnnnnnnnnnnnnnnnnnnnnnnnnnnnnnnnnnnnnnnnnnnnnnnnnnnnnnnnnnnnnnnnnnnnnnnnnnnnnnnnnnnnnnnnnnnnnnnnnnnnnnnnnnnnnnnnnnnnnnnnnnnnnnnnnnnnnnnnnnnnnnnnnnnnnnnnnnnnnnnnnnnnnnnnnnnnnnnnnnnnnnnnnnnnnnnnnnnnnnnnnnnnnnnnnnnnnnnnnnnnnnnnnnnnnnnnnnnnnnnnnnnnnnnnnnnnnnnnnnnnnnnnnnnnnnnnnnnnnnnnnnnnnnnnnnnnnnnnnnnnnnnnnnnnnnnnnnnnnnnnnnnnnnnnnnnnnnnnnnnnnnnnnnnnnnnnnnnnnnnnnnnnnnnnnnnnnnnnnnnnnnnnnnnnnnnnnnnnnnnnnnnnnnnnnnnnnnnnnnnnnnnnnnnnnnnnnnnnnnnnnnnnnnnnnnnnnnnnnnnnnnnnnnnnnnnnnnnnnnnnnnnnnnnnnnnnnnnnnnnnnnnnnnnnnnnnnnnnnnnnnnnnnnnnnnnnnnnnnnnnnnnnnnnnnnnnnnnnnnnnnnnnnnnnnnnnnnnnnnnnnnnnnnnnnnnnnnnnnnnnnnnnnnnnnnnnnnnnnnnnnnnnnnnnnnnnnnnnnnnnnnnnnnnnnnnnnnnnnnnnnnnnnnnnnnnnnnnnnnnnnnnnnnnnnnnnnnnnnnnnnnnnnnnnnnnnnnnnnnnnnnnnnnnnnnnnnnnnnnnnnnnnnnnnnnnnnnnnnnnnnnnnnnnnnnnnnnnnnnnnnnnnnnnnnnnnnnnnnnnnnnnnnnnnnnnnnnnnnnnnnnnnnnnnnnnnnnnnnnnnnnnnnnnnnnnnnnnnnnnnnnnnnnnnnnnnnnnnnnnnnnnnnnnnnnnnnnnnnnnnnnnnnnnnnnnnnnnnnnnnnnnnnnnnnnnnnnnnnnnnnnnnnnnnnnnnnnnnnnnnnnnnnnnnnnnnnnnnnnnnnnnnnnnnnnnnnnnnnnnnnnnnnnnnnnnnnnnnnnnnnnnnnnnnnnnnnnnnnnnnnnnnnnnnnnnnnnnnnnnnnnnnnnnnnnnnnnnnnnnnnnnnnnnnnnnnnnnnnnnnnnnnnnnnnnnnnnnnnnnnnnnnnnnnnnnnnnnnnnnnnnnnnnnnnnnnnnnnnnnnnnnnnnnnnnnnnnnnnnnnnnnnnnnnnnnnnnnnnnnnnnnnnnnnnnnnnnnnnnnnnnnnnnnnnnnnnnnnnnnnnnnnnnnnnnnnnnnnnnnnnnnnnnnnnnnnnnnnnnnnnnnnnnnnnnnnnnnnnnnnnnnnnnnnnnnnnnnnnnnnnnnnnnnnnnnnnnnnnnnnnnnnnnnnnnnnnnnnnnnnnnnnnnnnnnnnnnnnnnnnnnnnnnnnnnnnnnnnnnnnnnnnnnnnnnnnnnnnnnnnnnnnnnnnnnnnnnnnnnnnnnnnnnnnnnnnnnnnnnnnnnnnnnnnnnnnnnnnnnnnnnnnnnnnnnnnnnnnnnnnnnnnnnnnnnnnnnnnnnnnnnnnnnnnnnnnnnnnnnnnnnnnnnnnnnnnnnnnnnnnnnnnnnnnnnnnnnnnnnnnnnnnnnnnnnnnnnnnnnnnnnnnnnnnnnnnnnnnnnnnnnnnnnnnnnnnnnnnnnnnnnnnnnnnnnnnnnnnnnnnnnnnnnnnnnnnnnnnnnnnnnnnnnnnnnnnnnnnnnnnnnnnnnnnnnnnnnnnnnnnnnnnnnnnnnnnnnnnnnnnnnnnnnnnnnnnnnnnnnnnnnnnnnnnnnnnnnnnnnnnnnnnnnnnnnnnnnnnnnnnnnnnnnnnnnnnnnnnnnnnnnnnnnnnnnnnnnnnnnnnnnnnnnnnnnnnnnnnnnnnnnnnnnnnnnnnnnnnnnnnnnnnnnnnnnnnnnnnnnnnnnnnnnnnnnnnnnnnnnnnnnnnnnnnnnnnnnnnnnnnnnnnnnnnnnnnnnnnnnnnnnnnnnnnnnnnnnnnnnnnnnnnnnnnnnnnnnnnnnnnnnnnnnnnnnnnnnnnnnnnnnnnnnnnnnnnnnnnnnnnnnnnnnnnnnnnnnnnnnnnnnnnnnnnnnnnnnnnnnnnnnnnnnnnnnnnnnnnnnnnnnnnnnnnnnnnnnnnnnnnnnnnnnnnnnnnnnnnnnnnnnnnnnnnnnnnnnnnnnnnnnnnnnnnnnnnnnnnnnnnnnnnnnnnnnnnnnnnnnnnnnnnnnnnnnnnnnnnnnnnnnnnnnnnnnnnnnnnnnnnnnnnnnnnnnnnnnnnnnnnnnnnnnnnnnnnnnnnnnnnnnnnnnnnnnnnnnnnnnnnnnnnnnnnnnnnnnnnnnnnnnnnnnnnnnnnnnnnnnnnnnnnnnnnnnnnnnnnnnnnnnnnnnnnnnnnnnnnnnnnnnnnnnnnnnnnnnnnnnnnnnnnnnnnnnnnnnnnnnnnnnnnnnnnnnnnnnnnnnnnnnnnnnnnnnnnnnnnnnnnnnnnnnnnnnnnnnnnnnnnnnnnnnnnnnnnnnnnnnnnnnnnnnnnnnnnnnnnnnnnnnnnnnnnnnnnnnnnnnnnnnnnnnnnnnnnnnnnnnnnnnnnnnnnnnnnnnnnnnnnnnnnnnnnnnnnnnnnnnnnnnnnnnnnnnnnnnnnnnnnnnnnnnnnnnnnnnnnnnnnnnnnnnnnnnnnnnnnnnnnnnnnnnnnnnnnnnnnnnnnnnnnnnnnnnnnnnnnnnnnnnnnnnnnnnnnnnnnnnnnnnnnnnnnnnnnnnnnnnnnnnnnnnnnnnnnnnnnnnnnnnnnnnnnnnnnnnnnnnnnnnnnnnnnnnnnnnnnnnnnnnnnnnnnnnnnnnnnnnnnnnnnnnnnnnnnnnnnnnnnnnnnnnnnnnnnnnnnnnnnnnnnnnnnnnnnnnnnnnnnnnnnnnnnnnnnnnnnnnnnnnnnnnnnnnnnnnnnnnnnnnnnnnnnnnnnnnnnnnnnnnnnnnnnnnnnnnnnnnnnnnnnnnnnnnnnnnnnnnnnnnnnnnnnnnnnnnnnnnnnnnnnnnnnnnnnnnnnnnnnnnnnnnnnnnnnnnnnnnnnnnnnnnnnnnnnnnnnnnnnnnnnnnnnnnnnnnnnnnnnnnnnnnnnnnnnnnnnnnnnnnnnnnnnnnnnnnnnnnnnnnnnnnnnnnnnnnnnnnnnnnnnnnnnnnnnnnnnnnnnnnnnnnnnnnnnnnnnnnnnnnnnnnnnnnnnnnnnnnnnnnnnnnnnnnnnnnnnnnnnnnnnnnnnnnnnnnnnnnnnnnnnnnnnnnnnnnnnnnnnnnnnnnnnnnnnnnnnnnnnnnnnnnnnnnnnnnnnnnnnnnnnnnnnnnnnnnnnnnnnnnnnnnnnnnnnnnnnnnnnnnnnnnnnnnnnnnnnnnnnnnnnnnnnnnnnnnnnnnnnnnnnnnnnnnnnnnnnnnnnnnnnnnnnnnnnnnnnnnnnnnnnnnnnnnnnnnnnnnnnnnnnnnnnnnnnnnnnnnnnnnnnnnnnnnnnnnnnnnnnnnnnnnnnnnnnnnnnnnnnnnnnnnnnnnnnnnnnnnnnnnnnnnnnnnnnnnnnnnnnnnnnnnnnnnnnnnnnnnnnnnnnnnnnnnnnnnnnnnnnnnnnnnnnnnnnnnnnnnnnnnnnnnnnnnnnnnnnnnnnnnnnnnnnnnnnnnnnnnnnnnnnnnnnnnnnnnnnnnnnnnnnnnnnnnnnnnnnnnnnnnnnnnnnnnnnnnnnnnnnnnnnnnnnnnnnnnnnnnnnnnnnnnnnnnnnnnnnnnnnnnnnnnnnnnnnnnnnnnnnnnnnnnnnnnnnnnnnnnnnnnnnnnnnnnnnnnnnnnnnnnnnnnnnnnnnnnnnnnnnnnnnnnnnnnnnnnnnnnnnnnnnnnnnnnnnnnnnnnnnnnnnnnnnnnnnnnnnnnnnnnnnnnnnnnnnnnnnnnnnnnnnnnnnnnnnnnnnnnnnnnnnnnnnnnnnnnnnnnnnnnnnnnnnnnnnnnnnnnnnnnnnnnnnnnnnnnnnnnnnnnnnnnnnnnnnnnnnnnnnnnnnnnnnnnnnnnnnnnnnnnnnnnnnnnnnnnnnnnnnnnnnnnnnnnnnnnnnnnnnnnnnnnnnnnnnnnnnnnnnnnnnnnnnnnnnnnnnnnnnnnnnnnnnnnnnnnnnnnnnnnnnnnnnnnnnnnnnnnnnnnnnnnnnnnnnnnnnnnnnnnnnnnnnnnnnnnnnnnnnnnnnnnnnnnnnnnnnnnnnnnnnnnnnnnnnnnnnnnnnnnnnnnnnnnnnnnnnnnnnnnnnnnnnnnnnnnnnnnnnnnnnnnnnnnnnnnnnnnnnnnnnnnnnnnnnnnnnnnnnnnnnnnnnnnnnnnnnnnnnnnnnnnnnnnnnnnnnnnnnnnnnnnnnnnnnnnnnnnnnnnnnnnnnnnnnnnnnnnnnnnnnnnnnnnnnnnnnnnnnnnnnnnnnnnnnnnnnnnnnnnnnnnnnnnnnnnnnnnnnnnnnnnnnnnnnnnnnnnnnnnnnnnnnnnnnnnnnnnnnnnnnnnnnnnnnnnnnnnnnnnnnnnnnnnnnnnnnnnnnnnnnnnnnnnnnnnnnnnnnnnnnnnnnnnnnnnnnnnnnnnnnnnnnnnnnnnnnnnnnnnnnnnnnnnnnnnnnnnnnnnnnnnnnnnnnnnnnnnnnnnnnnnnnnnnnnnnnnnnnnnnnnnnnnnnnnnnnnnnnnnnnnnnnnnnnnnnnnnnnnnnnnnnnnnnnnnnnnnnnnnnnnnnnnnnnnnnnnnnnnnnnnnnnnnnnnnnnnnnnnnnnnnnnnnnnnnnnnnnnnnnnnnnnnnnnnnnnnnnnnnnnnnnnnnnnnnnnnnnnnnnnnnnnnnnnnnnnnnnnnnnnnnnnnnnnnnnnnnnnnnnnnnnnnnnnnnnnnnnnnnnnnnnnnnnnnnnnnnnnnnnnnnnnnnnnnnnnnnnnnnnnnnnnnnnnnnnnnnnnnnnnnnnnnnnnnnnnnnnnnnnnnnnnnnnnnnnnnnnnnnnnnnnnnnnnnnnnnnnnnnnnnnnnnnnnnnnnnnnnnnnnnnnnnnnnnnnnnnnnnnnnnnnnnnnnnnnnnnnnnnnnnnnnnnnnnnnnnnnnnnnnnnnnnnnnnnnnnnnnnnnnnnnnnnnnnnnnnnnnnnnnnnnnnnnnnnnnnnnnnnnnnnnnnnnnnnnnnnnnnnnnnnnnnnnnnnnnnnnnnnnnnnnnnnnnnnnnnnnnnnnnnnnnnnnnnnnnnnnnnnnnnnnnnnnnnnnnnnnnnnnnnnnnnnnnnnnnnnnnnnnnnnnnnnnnnnnnnnnnnnnnnnnnnnnnnnnnnnnnnnnnnnnnnnnnnnnnnnnnnnnnnnnnnnnnnnnnnnnnnnnnnnnnnnnnnnnnnnnnnnnnnnnnnnnnnnnnnnnnnnnnnnnnnnnnnnnnnnnnnnnnnnnnnnnnnnnnnnnnnnnnnnnnnnnnnnnnnnnnnnnnnnnnnnnnnnnnnnnnnnnnnnnnnnnnnnnnnnnnnnnnnnnnnnnnnnnnnnnnnnnnnnnnnnnnnnnnnnnnnnnnnnnnnnnnnnnnnnnnnnnnnnnnnnnnnnnnnnnnnnnnnnnnnnnnnnnnnnnnnnnnnnnnnnnnnnnnnnnnnnnnnnnnnnnnnnnnnnnnnnnnnnnnnnnnnnnnnnnnnnnnnnnnnnnnnnnnnnnnnnnnnnnnnnnnnnnnnnnnnnnnnnnnnnnnnnnnnnnnnnnnnnnnnnnnnnnnnnnnnnnnnnnnnnnnnnnnnnnnnnnnnnnnnnnnnnnnnnnnnnnnnnnnnnnnnnnnnnnnnnnnnnnnnnnnnnnnnnnnnnnnnnnnnnnnnnnnnnnnnnnnnnnnnnnnnnnnnnnnnnnnnnnnnnnnnnnnnnnnnnnnnnnnnnnnnnnnnnnnnnnnnnnnnnnnnnnnnnnnnnnnnnnnnnnnnnnnnnnnnnnnnnnnnnnnnnnnnnnnnnnnnnnnnnnnnnnnnnnnnnnnnnnnnnnnnnnnnnnnnnnnnnnnnnnnnnnnnnnnnnnnnnnnnnnnnnnnnnnnnnnnnnnnnnnnnnnnnnnnnnnnnnnnnnnnnnnnnnnnnnnnnnnnnnnnnnnnnnnnnnnnnnnnnnnnnnnnnnnnnnnnnnnnnnnnnnnnnnnnnnnnnnnnnnnnnnnnnnnnnnnnnnnnnnnnnnnnnnnnnnnnnnnnnnnnnnnnnnnnnnnnnnnnnnnnnnnnnnnnnnnnnnnnnnnnnnnnnnnnnnnnnnnnnnnnnnnnnnnnnnnnnnnnnnnnnnnnnnnnnnnnnnnnnnnnnnnnnnnnnnnnnnnnnnnnnnnnnnnnnnnnnnnnnnnnnnnnnnnnnnnnnnnnnnnnnnnnnnnnnnnnnnnnnnnnnnnnnnnnnnnnnnnnnnnnnnnnnnnnnnnnnnnnnnnnnnnnnnnnnnnnnnnnnnnnnnnnnnnnnnnnnnnnnnnnnnnnnnnnnnnnnnnnnnnnnnnnnnnnnnnnnnnnnnnnnnnnnnnnnnnnnnnnnnnnnnnnnnnnnnnnnnnnnnnnnnnnnnnnnnnnnnnnnnnnnnnnnnnnnnnnnnnnnnnnnnnnnnnnnnnnnnnnnnnnnnnnnnnnnnnnnnnnnnnnnnnnnnnnnnnnnnnnnnnnnnnnnnnnnnnnnnnnnnnnnnnnnnnnnnnnnnnnnnnnnnnnnnnnnnnnnnnnnnnnnnnnnnnnnnnnnnnnnnnnnnnnnnnnnnnnnnnnnnnnnnnnnnnnnnnnnnnnnnnnnnnnnnnnnnnnnnnnnnnnnnnnnnnnnnnnnnnnnnnnnnnnnnnnnnnnnnnnnnnnnnnnnnnnnnnnnnnnnnnnnnnnnnnnnnnnnnnnnnnnnnnnnnnnnnnnnnnnnnnnnnnnnnnnnnnnnnnnnnnnnnnnnnnnnnnnnnnnnnnnnnnnnnnnnnnnnnnnnnnnnnnnnnnnnnnnnnnnnnnnnnnnnnnnnnnnnnnnnnnnnnnnnnnnnnnnnnnnnnnnnnnnnnnnnnnnnnnnnnnnnnnnnnnnnnnnnnnnnnnnnnnnnnnnnnnnnnnnnnnnnnnnnnnnnnnnnnnnnnnnnnnnnnnnnnnnnnnnnnnnnnnnnnnnnnnnnnnnnnnnnnnnnnnnnnnnnnnnnnnnnnnnnnnnnnnnnnnnnnnnnnnnnnnnnnnnnnnnnnnnnnnnnnnnnnnnnnnnnnnnnnnnnnnnnnnnnnnnnnnnnnnnnnnnnnnnnnnnnnnnnnnnnnnnnnnnnnnnnnnnnnnnnnnnnnnnnnnnnnnnnnnnnnnnnnnnnnnnnnnnnnnnnnnnnnnnnnnnnnnnnnnnnnnnnnnnnnnnnnnnnnnnnnnnnnnnnnnnnnnnnnnnnnnnnnnnnnnnnnnnnnnnnnnnnnnnnnnnnnnnnnnnnnnnnnnnnnnnnnnnnnnnnnnnnnnnnnnnnnnnnnnnnnnnnnnnnnnnnnnnnnnnnnnnnnnnnnnnnnnnnnnnnnnnnnnnnnnnnnnnnnnnnnnnnnnnnnnnnnnnnnnnnnnnnnnnnnnnnnnnnnnnnnnnnnnnnnnnnnnnnnnnnnnnnnnnnnnnnnnnnnnnnnnnnnnnnnnnnnnnnnnnnnnnnnnnnnnnnnnnnnnnnnnnnnnnnnnnnnnnnnnnnnnnnnnnnnnnnnnnnnnnnnnnnnnnnnnnnnnnnnnnnnnnnnnnnnnnnnnnnnnnnnnnnnnnnnnnnnnnnnnnnnnnnnnnnnnnnnnnnnnnnnnnnnnnnnnnnnnnnnnnnnnnnnnnnnnnnnnnnnnnnnnnnnnnnnnnnnnnnnnnnnnnnnnnnnnnnnnnnnnnnnnnnnnnnnnnnnnnnnnnnnnnnnnnnnnnnnnnnnnnnnnnnnnnnnnnnnnnnnnnnnnnnnnnnnnnnnnnnnnnnnnnnnnnnnnnnnnnnnnnnnnnnnnnnnnnnnnnnnnnnnnnnnnnnnnnnnnnnnnnnnnnnnnnnnnnnnnnnnnnnnnnnnnnnnnnnnnnnnnnnnnnnnnnnnnnnnnnnnnnnnnnnnnnnnnnnnnnnnnnnnnnnnnnnnnnnnnnnnnnnnnnnnnnnnnnnnnnnnnnnnnnnnnnnnnnnnnnnnnnnnnnnnnnnnnnnnnnnnnnnnnnnnnnnnnnnnnnnnnnnnnnnnnnnnnnnnnnnnnnnnnnnnnnnnnnnnnnnnnnnnnnnnnnnnnnnnnnnnnnnnnnnnnnnnnnnnnnnnnnnnnnnnnnnnnnnnnnnnnnnnnnnnnnnnnnnnnnnnnnnnnnnnnnnnnnnnnnnnnnnnnnnnnnnnnnnnnnnnnnnnnnnnnnnnnnnnnnnnnnnnnnnnnnnnnnnnnnnnnnnnnnnnnnnnnnnnnnnnnnnnnnnnnnnnnnnnnnnnnnnnnnnnnnnnnnnnnnnnnnnnnnnnnnnnnnnnnnnnnnnnnnnnnnnnnnnnnnnnnnnnnnnnnnnnnnnnnnnnnnnnnnnnnnnnnnnnnnnnnnnnnnnnnnnnnnnnnnnnnnnnnnnnnnnnnnnnnnnnnnnnnnnnnnnnnnnnnnnnnnnnnnnnnnnnnnnnnnnnnnnnnnnnnnnnnnnnnnnnnnnnnnnnnnnnnnnnnnnnnnnnnnnnnnnnnnnnnnnnnnnnnnnnnnnnnnnnnnnnnnnnnnnnnnnnnnnnnnnnnnnnnnnnnnnnnnnnnnnnnnnnnnnnnnnnnnnnnnnnnnnnnnnnnnnnnnnnnnnnnnnnnnnnnnnnnnnnnnnnnnnnnnnnnnnnnnnnnnnnnnnnnnnnnnnnnnnnnnnnnnnnnnnnnnnnnnnnnnnnnnnnnnnnnnnnnnnnnnnnnnnnnnnnnnnnnnnnnnnnnnnnnnnnnnnnnnnnnnnnnnnnnnnnnnnnnnnnnnnnnnnnnnnnnnnnnnnnnnnnnnnnnnnnnnnnnnnnnnnnnnnnnnnnnnnnnnnnnnnnnnnnnnnnnnnnnnnnnnnnnnnnnnnnnnnnnnnnnnnnnnnnnnnnnnnnnnnnnnnnnnnnnnnnnnnnnnnnnnnnnnnnnnnnnnnnnnnnnnnnnnnnnnnnnnnnnnnnnnnnnnnnnnnnnnnnnnnnnnnnnnnnnnnnnnnnnnnnnnnnnnnnnnnnnnnnnnnnnnnnnnnnnnnnnnnnnnnnnnnnnnnnnnnnnnnnnnnnnnnnnnnnnnnnnnnnnnnnnnnnnnnnnnnnnnnnnnnnnnnnnnnnnnnnnnnnnnnnnnnnnnnnnnnnnnnnnnnnnnnnnnnnnnnnnnnnnnnnnnnnnnnnnnnnnnnnnnnnnnnnnnnnnnnnnnnnnnnnnnnnnnnnnnnnnnnnnnnnnnnnnnnnnnnnnnnnnnnnnnnnnnnnnnnnnnnnnnnnnnnnnnnnnnnnnnnnnnnnnnnnnnnnnnnnnnnnnnnnnnnnnnnnnnnnnnnnnnnnnnnnnnnnnnnnnnnnnnnnnnnnnnnnnnnnnnnnnnnnnnnnnnnnnnnnnnnnnnnnnnnnnnnnnnnnnnnnnnnnnnnnnnnnnnnnnnnnnnnnnnnnnnnnnnnnnnnnnnnnnnnnnnnnnnnnnnnnnnnnnnnnnnnnnnnnnnnnnnnnnnnnnnnnnnnnnnnnnnnnnnnnnnnnnnnnnnnnnnnnnnnnnnnnnnnnnnnnnnnnnnnnnnnnnnnnnnnnnnnnnnnnnnnnnnnnnnnnnnnnnnnnnnnnnnnnnnnnnnnnnnnnnnnnnnnnnnnnnnnnnnnnnnnnnnnnnnnnnnnnnnnnnnnnnnnnnnnnnnnnnnnnnnnnnnnnnnnnnnnnnnnnnnnnnnnnnnnnnnnnnnnnnnnnnnnnnnnnnnnnnnnnnnnnnnnnnnnnnnnnnnnnnnnnnnnnnnnnnnnnnnnnnnnnnnnnnnnnnnnnnnnnnnnnnnnnnnnnnnnnnnnnnnnnnnnnnnnnnnnnnnnnnnnnnnnnnnnnnnnnnnnnnnnnnnnnnnnnnnnnnnnnnnnnnnnnnnnnnnnnnnnnnnnnnnnnnnnnnnnnnnnnnnnnnnnnnnnnnnnnnnnnnnnnnnnnnnnnnnnnnnnnnnnnnnnnnnnnnnnnnnnnnnnnnnnnnnnnnnnnnnnnnnnnnnnnnnnnnnnnnnnnnnnnnnnnnnnnnnnnnnnnnnnnnnnnnnnnnnnnnnnnnnnnnnnnnnnnnnnnnnnnnnnnnnnnnnnnnnnnnnnnnnnnnnnnnnnnnnnnnnnnnnnnnnnnnnnnnnnnnnnnnnnnnnnnnnnnnnnnnnnnnnnnnnnnnnnnnnnnnnnnnnnnnnnnnnnnnnnnnnnnnnnnnnnnnnnnnnnnnnnnnnnnnnnnnnnnnnnnnnnnnnnnnnnnnnnnnnnnnnnnnnnnnnnnnnnnnnnnnnnnnnnnnnnnnnnnnnnnnnnnnnnnnnnnnnnnnnnnnnnnnnnnnnnnnnnnnnnnnnnnnnnnnnnnnnnnnnnnnnnnnnnnnnnnnnnnnnnnnnnnnnnnnnnnnnnnnnnnnnnnnnnnnnnnnnnnnnnnnnnnnnnnnnnnnnnnnnnnnnnnnnnnnnnnnnnnnnnnnnnnnnnnnnnnnnnnnnnnnnnnnnnnnnnnnnnnnnnnnnnnnnnnnnnnnnnnnnnnnnnnnnnnnnnnnnnnnnnnnnnnnnnnnnnnnnnnnnnnnnnnnnnnnnnnnnnnnnnnnnnnnnnnnnnnnnnnnnnnnnnnnnnnnnnnnnnnnnnnnnnnnnnnnnnnnnnnnnnnnnnnnnnnnnnnnnnnnnnnnnnnnnnnnnnnnnnnnnnnnnnnnnnnnnnnnnnnnnnnnnnnnnnnnnnnnnnnnnnnnnnnnnnnnnnnnnnnnnnnnnnnnnnnnnnnnnnnnnnnnnnnnnnnnnnnnnnnnnnnnnnnnnnnnnnnnnnnnnnnnnnnnnnnnnnnnnnnnnnnnnnnnnnnnnnnnnnnnnnnnnnnnnnnnnnnnnnnnnnnnnnnnnnnnnnnnnnnnnnnnnnnnnnnnnnnnnnnnnnnnnnnnnnnnnnnnnnnnnnnnnnnnnnnnnnnnnnnnnnnnnnnnnnnnnnnnnnnnnnnnnnnnnnnnnnnnnnnnnnnnnnnnnnnnnnnnnnnnnnnnnnnnnnnnnnnnnnnnnnnnnnnnnnnnnnnnnnnnnnnnnnnnnnnnnnnnnnnnnnnnnnnnnnnnnnnnnnnnnnnnnnnnnnnnnnnnnnnnnnnnnnnnnnnnnnnnnnnnnnnnnnnnnnnnnnnnnnnnnnnnnnnnnnnnnnnnnnnnnnnnnnnnnnnnnnnnnnnnnnnnnnnnnnnnnnnnnnnnnnnnnnnnnnnnnnnnnnnnnnnnnnnnnnnnnnnnnnnnnnnnnnnnnnnnnnnnnnnnnnnnnnnnnnnnnnnnnnnnnnnnnnnnnnnnnnnnnnnnnnnnnnnnnnnnnnnnnnnnnnnnnnnnnnnnnnnnnnnnnnnnnnnnnnnnnnnnnnnnnnnnnnnnnnnnnnnnnnnnnnnnnnnnnnnnnnnnnnnnnnnnnnnnnnnnnnnnnnnnnnnnnnnnnnnnnnnnnnnnnnnnnnnnnnnnnnnnnnnnnnnnnnnnnnnnnnnnnnnnnnnnnnnnnnnnnnnnnnnnnnnnnnnnnnnnnnnnnnnnnnnnnnnnnnnnnnnnnnnnnnnnnnnnnnnnnnnnnnnnnnnnnnnnnnnnnnnnnnnnnnnnnnnnnnnnnnnnnnnnnnnnnnnnnnnnnnnnnnnnnnnnnnnnnnnnnnnnnnnnnnnnnnnnnnnnnnnnnnnnnnnnnnnnnnnnnnnnnnnnnnnnnnnnnnnnnnnnnnnnnnnnnnnnnnnnnnnnnnnnnnnnnnnnnnnnnnnnnnnnnnnnnnnnnnnnnnnnnnnnnnnnnnnnnnnnnnnnnnnnnnnnnnnnnnnnnnnnnnnnnnnnnnnnnnnnnnnnnnnnnnnnnnnnnnnnnnnnnnnnnnnnnnnnnnnnnnnnnnnnnnnnnnnnnnnnnnnnnnnnnnnnnnnnnnnnnnnnnnnnnnnnnnnnnnnnnnnnnnnnnnnnnnnnnnnnnnnnnnnnnnnnnnnnnnnnnnnnnnnnnnnnnnnnnnnnnnnnnnnnnnnnnnnnnnnnnnnnnnnnnnnnnnnnnnnnnnnnnnnnnnnnnnnnnnnnnnnnnnnnnnnnnnnnnnnnnnnnnnnnnnnnnnnnnnnnnnnnnnnnnnnnnnnnnnnnnnnnnnnnnnnnnnnnnnnnnnnnnnnnnnnnnnnnnnnnnnnnnnnnnnnnnnnnnnnnnnnnnnnnnnnnnnnnnnnnnnnnnnnnnnnnnnnnnnnnnnnnnnnnnnnnnnnnnnnnnnnnnnnnnnnnnnnnnnnnnnnnnnnnnnnnnnnnnnnnnnnnnnnnnnnnnnnnnnnnnnnnnnnnnnnnnnnnnnnnnnnnnnnnnnnnnnnnnnnnnnnnnnnnnnnnnnnnnnnnnnnnnnnnnnnnnnnnnnnnnnnnnnnnnnnnnnnnnnnnnnnnnnnnnnnnnnnnnnnnnnnnnnnnnnnnnnnnnnnnnnnnnnnnnnnnnnnnnnnnnnnnnnnnnnnnnnnnnnnnnnnnnnnnnnnnnnnnnnnnnnnnnnnnnnnnnnnnnnnnnnnnnnnnnnnnnnnnnnnnnnnnnnnnnnnnnnnnnnnnnnnnnnnnnnnnnnnnnnnnnnnnnnnnnnnnnnnnnnnnnnnnnnnnnnnnnnnnnnnnnnnnnnnnnnnnnnnnnnnnnnnnnnnnnnnnnnnnnnnnnnnnnnnnnnnnnnnnnnnnnnnnnnnnnnnnnnnnnnnnnnnnnnnnnnnnnnnnnnnnnnnnnnnnnnnnnnnnnnnnnnnnnnnnnnnnnnnnnnnnnnnnnnnnnnnnnnnnnnnnnnnnnnnnnnnnnnnnnnnnnnnnnnnnnnnnnnnnnnnnnnnnnnnnnnnnnnnnnnnnnnnnnnnnnnnnnnnnnnnnnnnnnnnnnnnnnnnnnnnnnnnnnnnnnnnnnnnnnnnnnnnnnnnnnnnnnnnnnnnnnnnnnnnnnnnnnnnnnnnnnnnnnnnnnnnnnnnnnnnnnnnnnnnnnnnnnnnnnnnnnnnnnnnnnnnnnnnnnnnnnnnnnnnnnnnnnnnnnnnnnnnnnnnnnnnnnnnnnnnnnnnnnnnnnnnnnnnnnnnnnnnnnnnnnnnnnnnnnnnnnnnnnnnnnnnnnnnnnnnnnnnnnnnnnnnnnnnnnnnnnnnnnnnnnnnnnnnnnnnnnnnnnnnnnnnnnnnnnnnnnnnnnnnnnnnnnnnnnnnnnnnnnnnnnnnnnnnnnnnnnnnnnnnnnnnnnnnnnnnnnnnnnnnnnnnnnnnnnnnnnnnnnnnnnnnnnnnnnnnnnnnnnnnnnnnnnnnnnnnnnnnnnnnnnnnnnnnnnnnnnnnnnnnnnnnnnnnnnnnnnnnnnnnnnnnnnnnnnnnnnnnnnnnnnnnnnnnnnnnnnnnnnnnnnnnnnnnnnnnnnnnnnnnnnnnnnnnnnnnnnnnnnnnnnnnnnnnnnnnnnnnnnnnnnnnnnnnnnnnnnnnnnnnnnnnnnnnnnnnnnnnnnnnnnnnnnnnnnnnnnnnnnnnnnnnnnnnnnnnnnnnnnnnnnnnnnnnnnnnnnnnnnnnnnnnnnnnnnnnnnnnnnnnnnnnnnnnnnnnnnnnnnnnnnnnnnnnnnnnnnnnnnnnnnnnnnnnnnnnnnnnnnnnnnnnnnnnnnnnnnnnnnnnnnnnnnnnnnnnnnnnnnnnnnnnnnnnnnnnnnnnnnnnnnnnnnnnnnnnnnnnnnnnnnnnnnnnnnnnnnnnnnnnnnnnnnnnnnnnnnnnnnnnnnnnnnnnnnnnnnnnnnnnnnnnnnnnnnnnnnnnnnnnnnnnnnnnnnnnnnnnnnnnnnnnnnnnnnnnnnnnnnnnnnnnnnnnnnnnnnnnnnnnnnnnnnnnnnnnnnnnnnnnnnnnnnnnnnnnnnnnnnnnnnnnnnnnnnnnnnnnnnnnnnnnnnnnnnnnnnnnnnnnnnnnnnnnnnnnnnnnnnnnnnnnnnnnnnnnnnnnnnnnnnnnnnnnnnnnnnnnnnnnnnnnnnnnnnnnnnnnnnnnnnnnnnnnnnnnnnnnnnnnnnnnnnnnnnnnnnnnnnnnnnnnnnnnnnnnnnnnnnnnnnnnnnnnnnnnnnnnnnnnnnnnnnnnnnnnnnnnnnnnnnnnnnnnnnnnnnnnnnnnnnnnnnnnnnnnnnnnnnnnnnnnnnnnnnnnnnnnnnnnnnnnnnnnnnnnnnnnnnnnnnnnnnnnnnnnnnnnnnnnnnnnnnnnnnnnnnnnnnnnnnnnnnnnnnnnnnnnnnnnnnnnnnnnnnnnnnnnnnnnnnnnnnnnnnnnnnnnnnnnnnnnnnnnnnnnnnnnnnnnnnnnnnnnnnnnnnnnnnnnnnnnnnnnnnnnnnnnnnnnnnnnnnnnnnnnnnnnnnnnnnnnnnnnnnnnnnnnnnnnnnnnnnnnnnnnnnnnnnnnnnnnnnnnnnnnnnnnnnnnnnnnnnnnnnnnnnnnnnnnnnnnnnnnnnnnnnnnnnnnnnnnnnnnnnnnnnnnnnnnnnnnnnnnnnnnnnnnnnnnnnnnnnnnnnnnnnnnnnnnnnnnnnnnnnnnnnnnnnnnnnnnnnnnnnnnnnnnnnnnnnnnnnnnnnnnnnnnnnnnnnnnnnnnnnnnnnnnnnnnnnnnnnnnnnnnnnnnnnnnnnnnnnnnnnnnnnnnnnnnnnnnnnnnnnnnnnnnnnnnnnnnnnnnnnnnnnnnnnnnnnnnnnnnnnnnnnnnnnnnnnnnnnnnnnnnnnnnnnnnnnnnnnnnnnnnnnnnnnnnnnnnnnnnnnnnnnnnnnnnnnnnnnnnnnnnnnnnnnnnnnnnnnnnnnnnnnnnnnnnnnnnnnnnnnnnnnnnnnnnnnnnnnnnnnnnnnnnnnnnnnnnnnnnnnnnnnnnnnnnnnnnnnnnnnnnnnnnnnnnnnnnnnnnnnnnnnnnnnnnnnnnnnnnnnnnnnnnnnnnnnnnnnnnnnnnnnnnnnnnnnnnnnnnnnnnnnnnnnnnnnnnnnnnnnnnnnnnnnnnnnnnnnnnnnnnnnnnnnnnnnnnnnnnnnnnnnnnnnnnnnnnnnnnnnnnnnnnnnnnnnnnnnnnnnnnnnnnnnnnnnnnnnnnnnnnnnnnnnnnnnnnnnnnnnnnnnnnnnnnnnnnnnnnnnnnnnnnnnnnnnnnnnnnnnnnnnnnnnnnnnnnnnnnnnnnnnnnnnnnnnnnnnnnnnnnnnnnnnnnnnnnnnnnnnnnnnnnnnnnnnnnnnnnnnnnnnnnnnnnnnnnnnnnnnnnnnnnnnnnnnnnnnnnnnnnnnnnnnnnnnnnnnnnnnnnnnnnnnnnnnnnnnnnnnnnnnnnnnnnnnnnnnnnnnnnnnnnnnnnnnnnnnnnnnnnnnnnnnnnnnnnnnnnnnnnnnnnnnnnnnnnnnnnnnnnnnnnnnnnnnnnnnnnnnnnnnnnnnnnnnnnnnnnnnnnnnnnnnnnnnnnnnnnnnnnnnnnnnnnnnnnnnnnnnnnnnnnnnnnnnnnnnnnnnnnnnnnnnnnnnnnnnnnnnnnnnnnnnnnnnnnnnnnnnnnnnnnnnnnnnnnnnnnnnnnnnnnnnnnnnnnnnnnnnnnnnnnnnnnnnnnnnnnnnnnnnnnnnnnnnnnnnnnnnnnnnnnnnnnnnnnnnnnnnnnnnnnnnnnnnnnnnnnnnnnnnnnnnnnnnnnnnnnnnnnnnnnnnnnnnnnnnnnnnnnnnnnnnnnnnnnnnnnnnnnnnnnnnnnnnnnnnnnnnnnnnnnnnnnnnnnnnnnnnnnnnnnnnnnnnnnnnnnnnnnnnnnnnnnnnnnnnnnnnnnnnnnnnnnnnnnnnnnnnnnnnnnnnnnnnnnnnnnnnnnnnnnnnnnnnnnnnnnnnnnnnnnnnnnnnnnnnnnnnnnnnnnnnnnnnnnnnnnnnnnnnnnnnnnnnnnnnnnnnnnnnnnnnnnnnnnnnnnnnnnnnnnnnnnnnnnnnnnnnnnnnnnnnnnnnnnnnnnnnnnnnnnnnnnnnnnnnnnnnnnnnnnnnnnnnnnnnnnnnnnnnnnnnnnnnnnnnnnnnnnnnnnnnnnnnnnnnnnnnnnnnnnnnnnnnnnnnnnnnnnnnnnnnnnnnnnnnnnnnnnnnnnnnnnnnnnnnnnnnnnnnnnnnnnnnnnnnnnnnnnnnnnnnnnnnnnnnnnnnnnnnnnnnnnnnnnnnnnnnnnnnnnnnnnnnnnnnnnnnnnnnnnnnnnnnnnnnnnnnnnnnnnnnnnnnnnnnnnnnnnnnnnnnnnnnnnnnnnnnnnnnnnnnnnnnnnnnnnnnnnnnnnnnnnnnnnnnnnnnnnnnnnnnnnnnnnnnnnnnnnnnnnnnnnnnnnnnnnnnnnnnnnnnnnnnnnnnnnnnnnnnnnnnnnnnnnnnnnnnnnnnnnnnnnnnnnnnnnnnnnnnnnnnnnnnnnnnnnnnnnnnnnnnnnnnnnnnnnnnnnnnnnnnnnnnnnnnnnnnnnnnnnnnnnnnnnnnnnnnnnnnnnnnnnnnnnnnnnnnnnnnnnnnnnnnnnnnnnnnnnnnnnnnnnnnnnnnnnnnnnnnnnnnnnnnnnnnnnnnnnnnnnnnnnnnnnnnnnnnnnnnnnnnnnnnnnnnnnnnnnnnnnnnnnnnnnnnnnnnnnnnnnnnnnnnnnnnnnnnnnnnnnnnnnnnnnnnnnnnnnnnnnnnnnnnnnnnnnnnnnnnnnnnnnnnnnnnnnnnnnnnnnnnnnnnnnnnnnnnnnnnnnnnnnnnnnnnnnnnnnnnnnnnnnnnnnnnnnnnnnnnnnnnnnnnnnnnnnnnnnnnnnnnnnnnnnnnnnnnnnnnnnnnnnnnnnnnnnnnnnnnnnnnnnnnnnnnnnnnnnnnnnnnnnnnnnnnnnnnnnnnnnnnnnnnnnnnnnnnnnnnnnnnnnnnnnnnnnnnnnnnnnnnnnnnnnnnnnnnnnnnnnnnnnnnnnnnnnnnnnnnnnnnnnnnnnnnnnnnnnnnnnnnnnnnnnnnnnnnnnnnnnnnnnnnnnnnnnnnnnnnnnnnnnnnnnnnnnnnnnnnnnnnnnnnnnnnnnnnnnnnnnnnnnnnnnnnnnnnnnnnnnnnnnnnnnnnnnnnnnnnnnnnnnnnnnnnnnnnnnnnnnnnnnnnnnnnnnnnnnnnnnnnnnnnnnnnnnnnnnnnnnnnnnnnnnnnnnnnnnnnnnnnnnnnnnnnnnnnnnnnnnnnnnnnnnnnnnnnnnnnnnnnnnnnnnnnnnnnnnnnnnnnnnnnnnnnnnnnnnnnnnnnnnnnnnnnnnnnnnnnnnnnnnnnnnnnnnnnnnnnnnnnnnnnnnnnnnnnnnnnnnnnnnnnnnnnnnnnnnnnnnnnnnnnnnnnnnnnnnnnnnnnnnnnnnnnnnnnnnnnnnnnnnnnnnnnnnnnnnnnnnnnnnnnnnnnnnnnnnnnnnnnnnnnnnnnnnnnnnnnnnnnnnnnnnnnnnnnnnnnnnnnnnnnnnnnnnnnnnnnnnnnnnnnnnnnnnnnnnnnnnnnnnnnnnnnnnnnnnnnnnnnnnnnnnnnnnnnnnnnnnnnnnnnnnnnnnnnnnnnnnnnnnnnnnnnnnnnnnnnnnnnnnnnnnnnnnnnnnnnnnnnnnnnnnnnnnnnnnnnnnnnnnnnnnnnnnnnnnnnnnnnnnnnnnnnnnnnnnnnnnnnnnnnnnnnnnnnnnnnnnnnnnnnnnnnnnnnnnnnnnnnnnnnnnnnnnnnnnnnnnnnnnnnnnnnnnnnnnnnnnnnnnnnnnnnnnnnnnnnnnnnnnnnnnnnnnnnnnnnnnnnnnnnnnnnnnnnnnnnnnnnnnnnnnnnnnnnnnnnnnnnnnnnnnnnnnnnnnnnnnnnnnnnnnnnnnnnnnnnnnnnnnnnnnnnnnnnnnnnnnnnnnnnnnnnnnnnnnnnnnnnnnnnnnnnnnnnnnnnnnnnnnnnnnnnnnnnnnnnnnnnnnnnnnnnnnnnnnnnnnnnnnnnnnnnnnnnnnnnnnnnnnnnnnnnnnnnnnnnnnnnnnnnnnnnnnnnnnnnnnnnnnnnnnnnnnnnnnnnnnnnnnnnnnnnnnnnnnnnnnnnnnnnnnnnnnnnnnnnnnnnnnnnnnnnnnnnnnnnnnnnnnnnnnnnnnnnnnnnnnnnnnnnnnnnnnnnnnnnnnnnnnnnnnnnnnnnnnnnnnnnnnnnnnnnnnnnnnnnnnnnnnnnnnnnnnnnnnnnnnnnnnnnnnnnnnnnnnnnnnnnnnnnnnnnnnnnnnnnnnnnnnnnnnnnnnnnnnnnnnnnnnnnnnnnnnnnnnnnnnnnnnnnnnnnnnnnnnnnnnnnnnnnnnnnnnnnnnnnnnnnnnnnnnnnnnnnnnnnnnnnnnnnnnnnnnnnnnnnnnnnnnnnnnnnnnnnnnnnnnnnnnnnnnnnnnnnnnnnnnnnnnnnnnnnnnnnnnnnnnnnnnnnnnnnnnnnnnnnnnnnnnnnnnnnnnnnnnnnnnnnnnnnnnnnnnnnnnnnnnnnnnnnnnnnnnnnnnnnnnnnnnnnnnnnnnnnnnnnnnnnnnnnnnnnnnnnnnnnnnnnnnnnnnnnnnnnnnnnnnnnnnnnnnnnnnnnnnnnnnnnnnnnnnnnnnnnnnnnnnnnnnnnnnnnnnnnnnnnnnnnnnnnnnnnnnnnnnnnnnnnnnnnnnnnnnnnnnnnnnnnnnnnnnnnnnnnnnnnnnnnnnnnnnnnnnnnnnnnnnnnnnnnnnnnnnnnnnnnnnnnnnnnnnnnnnnnnnnnnnnnnnnnnnnnnnnnnnnnnnnnnnnnnnnnnnnnnnnnnnnnnnnnnnnnnnnnnnnnnnnnnnnnnnnnnnnnnnnnnnnnnnnnnnnnnnnnnnnnnnnnnnnnnnnnnnnnnnnnnnnnnnnnnnnnnnnnnnnnnnnnnnnnnnnnnnnnnnnnnnnnnnnnnnnnnnnnnnnnnnnnnnnnnnnnnnnnnnnnnnnnnnnnnnnnnnnnnnnnnnnnnnnnnnnnnnnnnnnnnnnnnnnnnnnnnnnnnnnnnnnnnnnnnnnnnnnnnnnnnnnnnnnnnnnnnnnnnnnnnnnnnnnnnnnnnnnnnnnnnnnnnnnnnnnnnnnnnnnnnnnnnnnnnnnnnnnnnnnnnnnnnnnnnnnnnnnnnnnnnnnnnnnnnnnnnnnnnnnnnnnnnnnnnnnnnnnnnnnnnnnnnnnnnnnnnnnnnnnnnnnnnnnnnnnnnnnnnnnnnnnnnnnnnnnnnnnnnnnnnnnnnnnnnnnnnnnnnnnnnnnnnnnnnnnnnnnnnnnnnnnnnnnnnnnnnnnnnnnnnnnnnnnnnnnnnnnnnnnnnnnnnnnnnnnnnnnnnnnnnnnnnnnnnnnnnnnnnnnnnnnnnnnnnnnnnnnnnnnnnnnnnnnnnnnnnnnnnnnnnnnnnnnnnnnnnnnnnnnnnnnnnnnnnnnnnnnnnnnnnnnnnnnnnnnnnnnnnnnnnnnnnnnnnnnnnnnnnnnnnnnnnnnnnnnnnnnnnnnnnnnnnnnnnnnnnnnnnnnnnnnnnnnnnnnnnnnnnnnnnnnnnnnnnnnnnnnnnnnnnnnnnnnnnnnnnnnnnnnnnnnnnnnnnnnnnnnnnnnnnnnnnnnnnnnnnnnnnnnnnnnnnnnnnnnnnnnnnnnnnnnnnnnnnnnnnnnnnnnnnnnnnnnnnnnnnnnnnnnnnnnnnnnnnnnnnnnnnnnnnnnnnnnnnnnnnnnnnnnnnnnnnnnnnnnnnnnnnnnnnnnnnnnnnnnnnnnnnnnnnnnnnnnnnnnnnnnnnnnnnnnnnnnnnnnnnnnnnnnnnnnnnnnnnnnnnnnnnnnnnnnnnnnnnnnnnnnnnnnnnnnnnnnnnnnnnnnnnnnnnnnnnnnnnnnnnnnnnnnnnnnnnnnnnnnnnnnnnnnnnnnnnnnnnnnnnnnnnnnnnnnnnnnnnnnnnnnnnnnnnnnnnnnnnnnnnnnnnnnnnnnnnnnnnnnnnnnnnnnnnnnnnnnnnnnnnnnnnnnnnnnnnnnnnnnnnnnnnnnnnnnnnnnnnnnnnnnnnnnnnnnnnnnnnnnnnnnnnnnnnnnnnnnnnnnnnnnnnnnnnnnnnnnnnnnnnnnnnnnnnnnnnnnnnnnnnnnnnnnnnnnnnnnnnnnnnnnnnnnnnnnnnnnnnnnnnnnnnnnnnnnnnnnnnnnnnnnnnnnnnnnnnnnnnnnnnnnnnnnnnnnnnnnnnnnnnnnnnnnnnnnnnnnnnnnnnnnnnnnnnnnnnnnnnnnnnnnnnnnnnnnnnnnnnnnnnnnnnnnnnnnnnnnnnnnnnnnnnnnnnnnnnnnnnnnnnnnnnnnnnnnnnnnnnnnnnnnnnnnnnnnnnnnnnnnnnnnnnnnnnnnnnnnnnnnnnnnnnnnnnnnnnnnnnnnnnnnnnnnnnnnnnnnnnnnnnnnnnnnnnnnnnnnnnnnnnnnnnnnnnnnnnnnnnnnnnnnnnnnnnnnnnnnnnnnnnnnnnnnnnnnnnnnnnnnnnnnnnnnnnnnnnnnnnnnnnnnnnnnnnnnnnnnnnnnnnnnnnnnnnnnnnnnnnnnnnnnnnnnnnnnnnnnnnnnnnnnnnnnnnnnnnnnnnnnnnnnnnnnnnnnnnnnnnnnnnnnnnnnnnnnnnnnnnnnnnnnnnnnnnnnnnnnnnnnnnnnnnnnnnnnnnnnnnnnnnnnnnnnnnnnnnnnnnnnnnnnnnnnnnnnnnnnnnnnnnnnnnnnnnnnnnnnnnnnnnnnnnnnnnnnnnnnnnnnnnnnnnnnnnnnnnnnnnnnnnnnnnnnnnnnnnnnnnnnnnnnnnnnnnnnnnnnnnnnnnnnnnnnnnnnnnnnnnnnnnnnnnnnnnnnnnnnnnnnnnnnnnnnnnnnnnnnnnnnnnnnnnnnnnnnnnnnnnnnnnnnnnnnnnnnnnnnnnnnnnnnnnnnnnnnnnnnnnnnnnnnnnnnnnnnnnnnnnnnnnnnnnnnnnnnnnnnnnnnnnnnnnnnnnnnnnnnnnnnnnnnnnnnnnnnnnnnnnnnnnnnnnnnnnnnnnnnnnnnnnnnnnnnnnnnnnnnnnnnnnnnnnnnnnnnnnnnnnnnnnnnnnnnnnnnnnnnnnnnnnnnnnnnnnnnnnnnnnnnnnnnnnnnnnnnnnnnnnnnnnnnnnnnnnnnnnnnnnnnnnnnnnnnnnnnnnnnnnnnnnnnnnnnnnnnnnnnnnnnnnnnnnnnnnnnnnnnnnnnnnnnnnnnnnnnnnnnnnnnnnnnnnnnnnnnnnnnnnnnnnnnnnnnnnnnnnnnnnnnnnnnnnnnnnnnnnnnnnnnnnnnnnnnnnnnnnnnnnnnnnnnnnnnnnnnnnnnnnnnnnnnnnnnnnnnnnnnnnnnnnnnnnnnnnnnnnnnnnnnnnnnnnnnnnnnnnnnnnnnnnnnnnnnnnnnnnnnnnnnnnnnnnnnnnnnnnnnnnnnnnnnnnnnnnnnnnnnnnnnnnnnnnnnnnnnnnnnnnnnnnnnnnnnnnnnnnnnnnnnnnnnnnnnnnnnnnnnnnnnnnnnnnnnnnnnnnnnnnnnnnnnnnnnnnnnnnnnnnnnnnnnnnnnnnnnnnnnnnnnnnnnnnnnnnnnnnnnnnnnnnnnnnnnnnnnnnnnnnnnnnnnnnnnnnnnnnnnnnnnnnnnnnnnnnnnnnnnnnnnnnnnnnnnnnnnnnnnnnnnnnnnnnnnnnnnnnnnnnnnnnnnnnnnnnnnnnnnnnnnnnnnnnnnnnnnnnnnnnnnnnnnnnnnnnnnnnnnnnnnnnnnnnnnnnnnnnnnnnnnnnnnnnnnnnnnnnnnnnnnnnnnnnnnnnnnnnnnnnnnnnnnnnnnnnnnnnnnnnnnnnnnnnnnnnnnnnnnnnnnnnnnnnnnnnnnnnnnnnnnnnnnnnnnnnnnnnnnnnnnnnnnnnnnnnnnnnnnnnnnnnnnnnnnnnnnnnnnnnnnnnnnnnnnnnnnnnnnnnnnnnnnnnnnnnnnnnnnnnnnnnnnnnnnnnnnnnnnnnnnnnnnnnnnnnnnnnnnnnnnnnnnnnnnnnnnnnnnnnnnnnnnnnnnnnnnnnnnnnnnnnnnnnnnnnnnnnnnnnnnnnnnnnnnnnnnnnnnnnnnnnnnnnnnnnnnnnnnnnnnnnnnnnnnnnnnnnnnnnnnnnnnnnnnnnnnnnnnnnnnnnnnnnnnnnnnnnnnnnnnnnnnnnnnnnnnnnnnnnnnnnnnnnnnnnnnnnnnnnnnnnnnnnnnnnnnnnnnnnnnnnnnnnnnnnnnnnnnnnnnnnnnnnnnnnnnnnnnnnnnnnnnnnnnnnnnnnnnnnnnnnnnnnnnnnnnnnnnnnnnnnnnnnnnnnnnnnnnnnnnnnnnnnnnnnnnnnnnnnnnnnnnnnnnnnnnnnnnnnnnnnnnnnnnnnnnnnnnnnnnnnnnnnnnnnnnnnnnnnnnnnnnnnnnnnnnnnnnnnnnnnnnnnnnnnnnnnnnnnnnnnnnnnnnnnnnnnnnnnnnnnnnnnnnnnnnnnnnnnnnnnnnnnnnnnnnnnnnnnnnnnnnnnnnnnnnnnnnnnnnnnnnnnnnnnnnnnnnnnnnnnnnnnnnnnnnnnnnnnnnnnnnnnnnnnnnnnnnnnnnnnnnnnnnnnnnnnnnnnnnnnnnnnnnnnnnnnnnnnnnnnnnnnnnnnnnnnnnnnnnnnnnnnnnnnnnnnnnnnnnnnnnnnnnnnnnnnnnnnnnnnnnnnnnnnnnnnnnnnnnnnnnnnnnnnnnnnnnnnnnnnnnnnnnnnnnnnnnnnnnnnnnnnnnnnnnnnnnnnnnnnnnnnnnnnnnnnnnnnnnnnnnnnnnnnnnnnnnnnnnnnnnnnnnnnnnnnnnnnnnnnnnnnnnnnnnnnnnnnnnnnnnnnnnnnnnnnnnnnnnnnnnnnnnnnnnnnnnnnnnnnnnnnnnnnnnnnnnnnnnnnnnnnnnnnnnnnnnnnnnnnnnnnnnnnnnnnnnnnnnnnnnnnnnnnnnnnnnnnnnnnnnnnnnnnnnnnnnnnnnnnnnnnnnnnnnnnnnnnnnnnnnnnnnnnnnnnnnnnnnnnnnnnnnnnnnnnnnnnnnnnnnnnnnnnnnnnnnnnnnnnnnnnnnnnnnnnnnnnnnnnnnnnnnnnnnnnnnnnnnnnnnnnnnnnnnnnnnnnnnnnnnnnnnnnnnnnnnnnnnnnnnnnnnnnnnnnnnnnnnnnnnnnnnnnnnnnnnnnnnnnnnnnnnnnnnnnnnnnnnnnnnnnnnnnnnnnnnnnnnnnnnnnnnnnnnnnnnnnnnnnnnnnnnnnnnnnnnnnnnnnnnnnnnnnnnnnnnnnnnnnnnnnnnnnnnnnnnnnnnnnnnnnnnnnnnnnnnnnnnnnnnnnnnnnnnnnnnnnnnnnnnnnnnnnnnnnnnnnnnnnnnnnnnnnnnnnnnnnnnnnnnnnnnnnnnnnnnnnnnnnnnnnnnnnnnnnnnnnnnnnnnnnnnnnnnnnnnnnnnnnnnnnnnnnnnnnnnnnnnnnnnnnnnnnnnnnnnnnnnnnnnnnnnnnnnnnnnnnnnnnnnnnnnnnnnnnnnnnnnnnnnnnnnnnnnnnnnnnnnnnnnnnnnnnnnnnnnnnnnnnnnnnnnnnnnnnnnnnnnnnnnnnnnnnnnnnnnnnnnnnnnnnnnnnnnnnnnnnnnnnnnnnnnnnnnnnnnnnnnnnnnnnnnnnnnnnnnnnnnnnnnnnnnnnnnnnnnnnnnnnnnnnnnnnnnnnnnnnnnnnnnnnnnnnnnnnnnnnnnnnnnnnnnnnnnnnnnnnnnnnnnnnnnnnnnnnnnnnnnnnnnnnnnnnnnnnnnnnnnnnnnnnnnnnnnnnnnnnnnnnnnnnnnnnnnnnnnnnnnnnnnnnnnnnnnnnnnnnnnnnnnnnnnnnnnnnnnnnnnnnnnnnnnnnnnnnnnnnnnnnnnnnnnnnnnnnnnnnnnnnnnnnnnnnnnnnnnnnnnnnnnnnnnnnnnnnnnnnnnnnnnnnnnnnnnnnnnnnnnnnnnnnnnnnnnnnnnnnnnnnnnnnnnnnnnnnnnnnnnnnnnnnnnnnnnnnnnnnnnnnnnnnnnnnnnnnnnnnnnnnnnnnnnnnnnnnnnnnnnnnnnnnnnnnnnnnnnnnnnnnnnnnnnnnnnnnnnnnnnnnnnnnnnnnnnnnnnnnnnnnnnnnnnnnnnnnnnnnnnnnnnnnnnnnnnnnnnnnnnnnnnnnnnnnnnnnnnnnnnnnnnnnnnnnnnnnnnnnnnnnnnnnnnnnnnnnnnnnnnnnnnnnnnnnnnnnnnnnnnnnnnnnnnnnnnnnnnnnnnnnnnnnnnnnnnnnnnnnnnnnnnnnnnnnnnnnnnnnnnnnnnnnnnnnnnnnnnnnnnnnnnnnnnnnnnnnnnnnnnnnnnnnnnnnnnnnnnnnnnnnnnnnnnnnnnnnnnnnnnnnnnnnnnnnnnnnnnnnnnnnnnnnnnnnnnnnnnnnnnnnnnnnnnnnnnnnnnnnnnnnnnnnnnnnnnnnnnnnnnnnnnnnnnnnnnnnnnnnnnnnnnnnnnnnnnnnnnnnnnnnnnnnnnnnnnnnnnnnnnnnnnnnnnnnnnnnnnnnnnnnnnnnnnnnnnnnnnnnnnnnnnnnnnnnnnnnnnnnnnnnnnnnnnnnnnnnnnnnnnnnnnnnnnnnnnnnnnnnnnnnnnnnnnnnnnnnnnnnnnnnnnnnnnnnnnnnnnnnnnnnnnnnnnnnnnnnnnnnnnnnnnnnnnnnnnnnnnnnnnnnnnnnnnnnnnnnnnnnnnnnnnnnnnnnnnnnnnnnnnnnnnnnnnnnnnnnnnnnnnnnnnnnnnnnnnnnnnnnnnnnnnnnnnnnnnnnnnnnnnnnnnnnnnnnnnnnnnnnnnnnnnnnnnnnnnnnnnnnnnnnnnnnnnnnnnnnnnnnnnnnnnnnnnnnnnnnnnnnnnnnnnnnnnnnnnnnnnnnnnnnnnnnnnnnnnnnnnnnnnnnnnnnnnnnnnnnnnnnnnnnnnnnnnnnnnnnnnnnnnnnnnnnnnnnnnnnnnnnnnnnnnnnnnnnnnnnnnnnnnnnnnnnnnnnnnnnnnnnnnnnnnnnnnnnnnnnnnnnnnnnnnnnnnnnnnnnnnnnnnnnnnnnnnnnnnnnnnnnnnnnnnnnnnnnnnnnnnnnnnnnnnnnnnnnnnnnnnnnnnnnnnnnnnnnnnnnnnnnnnnnnnnnnnnnnnnnnnnnnnnnnnnnnnnnnnnnnnnnnnnnnnnnnnnnnnnnnnnnnnnnnnnnnnnnnnnnnnnnnnnnnnnnnnnnnnnnnnnnnnnnnnnnnnnnnnnnnnnnnnnnnnnnnnnnnnnnnnnnnnnnnnnnnnnnnnnnnnnnnnnnnnnnnnnnnnnnnnnnnnnnnnnnnnnnnnnnnnnnnnnnnnnnnnnnnnnnnnnnnnnnnnnnnnnnnnnnnnnnnnnnnnnnnnnnnnnnnnnnnnnnnnnnnnnnnnnnnnnnnnnnnnnnnnnnnnnnnnnnnnnnnnnnnnnnnnnnnnnnnnnnnnnnnnnnnnnnnnnnnnnnnnnnnnnnnnnnnnnnnnnnnnnnnnnnnnnnnnnnnnnnnnnnnnnnnnnnnnnnnnnnnnnnnnnnnnnnnnnnnnnnnnnnnnnnnnnnnnnnnnnnnnnnnnnnnnnnnnnnnnnnnnnnnnnnnnnnnnnnnnnnnnnnnnnnnnnnnnnnnnnnnnnnnnnnnnnnnnnnnnnnnnnnnnnnnnnnnnnnnnnnnnnnnnnnnnnnnnnnnnnnnnnnnnnnnnnnnnnnnnnnnnnnnnnnnnnnnnnnnnnnnnnnnnnnnnnnnnnnnnnnnnnnnnnnnnnnnnnnnnnnnnnnnnnnnnnnnnnnnnnnnnnnnnnnnnnnnnnnnnnnnnnnnnnnnnnnnnnnnnnnnnnnnnnnnnnnnnnnnnnnnnnnnnnnnnnnnnnnnnnnnnnnnnnnnnnnnnnnnnnnnnnnnnnnnnnnnnnnnnnnnnnnnnnnnnnnnnnnnnnnnnnnnnnnnnnnnnnnnnnnnnnnnnnnnnnnnnnnnnnnnnnnnnnnnnnnnnnnnnnnnnnnnnnnnnnnnnnnnnnnnnnnnnnnnnnnnnnnnnnnnnnnnnnnnnnnnnnnnnnnnnnnnnnnnnnnnnnnnnnnnnnnnnnnnnnnnnnnnnnnnnnnnnnnnnnnnnnnnnnnnnnnnnnnnnnnnnnnnnnnnnnnnnnnnnnnnnnnnnnnnnnnnnnnnnnnnnnnnnnnnnnnnnnnnnnnnnnnnnnnnnnnnnnnnnnnnnnnnnnnnnnnnnnnnnnnnnnnnnnnnnnnnnnnnnnnnnnnnnnnnnnnnnnnnnnnnnnnnnnnnnnnnnnnnnnnnnnnnnnnnnnnnnnnnnnnnnnnnnnnnnnnnnnnnnnnnnnnnnnnnnnnnnnnnnnnnnnnnnnnnnnnnnnnnnnnnnnnnnnnnnnnnnnnnnnnnnnnnnnnnnnnnnnnnnnnnnnnnnnnnnnnnnnnnnnnnnnnnnnnnnnnnnnnnnnnnnnnnnnnnnnnnnnnnnnnnnnnnnnnnnnnnnnnnnnnnnnnnnnnnnnnnnnnnnnnnnnnnnnnnnnnnnnnnnnnnnnnnnnnnnnnnnnnnnnnnnnnnnnnnnnnnnnnnnnnnnnnnnnnnnnnnnnnnnnnnnnnnnnnnnnnnnnnnnnnnnnnnnnnnnnnnnnnnnnnnnnnnnnnnnnnnnnnnnnnnnnnnnnnnnnnnnnnnnnnnnnnnnnnnnnnnnnnnnnnnnnnnnnnnnnnnnnnnnnnnnnnnnnnnnnnnnnnnnnnnnnnnnnnnnnnnnnnnnnnnnnnnnnnnnnnnnnnnnnnnnnnnnnnnnnnnnnnnnnnnnnnnnnnnnnnnnnnnnnnnnnnnnnnnnnnnnnnnnnnnnnnnnnnnnnnnnnnnnnnnnnnnnnnnnnnnnnnnnnnnnnnnnnnnnnnnnnnnnnnnnnnnnnnnnnnnnnnnnnnnnnnnnnnnnnnnnnnnnnnnnnnnnnnnnnnnnnnnnnnnnnnnnnnnnnnnnnnnnnnnnnnnnnnnnnnnnnnnnnnnnnnnnnnnnnnnnnnnnnnnnnnnnnnnnnnnnnnnnnnnnnnnnnnnnnnnnnnnnnnnnnnnnnnnnnnnnnnnnnnnnnnnnnnnnnnnnnnnnnnnnnnnnnnnnnnnnnnnnnnnnnnnnnnnnnnnnnnnnnnnnnnnnnnnnnnnnnnnnnnnnnnnnnnnnnnnnnnnnnnnnnnnnnnnnnnnnnnnnnnnnnnnnnnnnnnnnnnnnnnnnnnnnnnnnnnnnnnnnnnnnnnnnnnnnnnnnnnnnnnnnnnnnnnnnnnnnnnnnnnnnnnnnnnnnnnnnnnnnnnnnnnnnnnnnnnnnnnnnnnnnnnnnnnnnnnnnnnnnnnnnnnnnnnnnnnnnnnnnnnnnnnnnnnnnnnnnnnnnnnnnnnnnnnnnnnnnnnnnnnnnnnnnnnnnnnnnnnnnnnnnnnnnnnnnnnnnnnnnnnnnnnnnnnnnnnnnnnnnnnnnnnnnnnnnnnnnnnnnnnnnnnnnnnnnnnnnnnnnnnnnnnnnnnnnnnnnnnnnnnnnnnnnnnnnnnnnnnnnnnnnnnnnnnnnnnnnnnnnnnnnnnnnnnnnnnnnnnnnnnnnnnnnnnnnnnnnnnnnnnnnnnnnnnnnnnnnnnnnnnnnnnnnnnnnnnnnnnnnnnnnnnnnnnnnnnnnnnnnnnnnnnnnnnnnnnnnnnnnnnnnnnnnnnnnnnnnnnnnnnnnnnnnnnnnnnnnnnnnnnnnnnnnnnnnnnnnnnnnnnnnnnnnnnnnnnnnnnnnnnnnnnnnnnnnnnnnnnnnnnnnnnnnnnnnnnnnnnnnnnnnnnnnnnnnnnnnnnnnnnnnnnnnnnnnnnnnnnnnnnnnnnnnnnnnnnnnnnnnnnnnnnnnnnnnnnnnnnnnnnnnnnnnnnnnnnnnnnnnnnnnnnnnnnnnnnnnnnnnnnnnnnnnnnnnnnnnnnnnnnnnnnnnnnnnnnnnnnnnnnnnnnnnnnnnnnnnnnnnnnnnnnnnnnnnnnnnnnnnnnnnnnnnnnnnnnnnnnnnnnnnnnnnnnnnnnnnnnnnnnnnnnnnnnnnnnnnnnnnnnnnnnnnnnnnnnnnnnnnnnnnnnnnnnnnnnnnnnnnnnnnnnnnnnnnnnnnnnnnnnnnnnnnnnnnnnnnnnnnnnnnnnnnnnnnnnnnnnnnnnnnnnnnnnnnnnnnnnnnnnnnnnnnnnnnnnnnnnnnnnnnnnnnnnnnnnnnnnnnnnnnnnnnnnnnnnnnnnnnnnnnnnnnnnnnnnnnnnnnnnnnnnnnnnnnnnnnnnnnnnnnnnnnnnnnnnnnnnnnnnnnnnnnnnnnnnnnnnnnnnnnnnnnnnnnnnnnnnnnnnnnnnnnnnnnnnnnnnnnnnnnnnnnnnnnnnnnnnnnnnnnnnnnnnnnnnnnnnnnnnnnnnnnnnnnnnnnnnnnnnnnnnnnnnnnnnnnnnnnnnnnnnnnnnnnnnnnnnnnnnnnnnnnnnnnnnnnnnnnnnnnnnnnnnnnnnnnnnnnnnnnnnnnnnnnnnnnnnnnnnnnnnnnnnnnnnnnnnnnnnnnnnnnnnnnnnnnnnnnnnnnnnnnnnnnnnnnnnnnnnnnnnnnnnnnnnnnnnnnnnnnnnnnnnnnnnnnnnnnnnnnnnnnnnnnnnnnnnnnnnnnnnnnnnnnnnnnnnnnnnnnnnnnnnnnnnnnnnnnnnnnnnnnnnnnnnnnnnnnnnnnnnnnnnnnnnnnnnnnnnnnnnnnnnnnnnnnnnnnnnnnnnnnnnnnnnnnnnnnnnnnnnnnnnnnnnnnnnnnnnnnnnnnnnnnnnnnnnnnnnnnnnnnnnnnnnnnnnnnnnnnnnnnnnnnnnnnnnnnnnnnnnnnnnnnnnnnnnnnnnnnnnnnnnnnnnnnnnnnnnnnnnnnnnnnnnnnnnnnnnnnnnnnnnnnnnnnnnnnnnnnnnnnnnnnnnnnnnnnnnnnnnnnnnnnnnnnnnnnnnnnnnnnnnnnnnnnnnnnnnnnnnnnnnnnnnnnnnnnnnnnnnnnnnnnnnnnnnnnnnnnnnnnnnnnnnnnnnnnnnnnnnnnnnnnnnnnnnnnnnnnnnnnnnnnnnnnnnnnnnnnnnnnnnnnnnnnnnnnnnnnnnnnnnnnnnnnnnnnnnnnnnnnnnnnnnnnnnnnnnnnnnnnnnnnnnnnnnnnnnnnnnnnnnnnnnnnnnnnnnnnnnnnnnnnnnnnnnnnnnnnnnnnnnnnnnnnnnnnnnnnnnnnnnnnnnnnnnnnnnnnnnnnnnnnnnnnnnnnnnnnnnnnnnnnnnnnnnnnnnnnnnnnnnnnnnnnnnnnnnnnnnnnnnnnnnnnnnnnnnnnnnnnnnnnnnnnnnnnnnnnnnnnnnnnnnnnnnnnnnnnnnnnnnnnnnnnnnnnnnnnnnnnnnnnnnnnnnnnnnnnnnnnnnnnnnnnnnnnnnnnnnnnnnnnnnnnnnnnnnnnnnnnnnnnnnnnnnnnnnnnnnnnnnnnnnnnnnnnnnnnnnnnnnnnnnnnnnnnnnnnnnnnnnnnnnnnnnnnnnnnnnnnnnnnnnnnnnnnnnnnnnnnnnnnnnnnnnnnnnnnnnnnnnnnnnnnnnnnnnnnnnnnnnnnnnnnnnnnnnnnnnnnnnnnnnnnnnnnnnnnnnnnnnnnnnnnnnnnnnnnnnnnnnnnnnnnnnnnnnnnnnnnnnnnnnnnnnnnnnnnnnnnnnnnnnnnnnnnnnnnnnnnnnnnnnnnnnnnnnnnnnnnnnnnnnnnnnnnnnnnnnnnnnnnnnnnnnnnnnnnnnnnnnnnnnnnnnnnnnnnnnnnnnnnnnnnnnnnnnnnnnnnnnnnnnnnnnnnnnnnnnnnnnnnnnnnnnnnnnnnnnnnnnnnnnnnnnnnnnnnnnnnnnnnnnnnnnnnnnnnnnnnnnnnnnnnnnnnnnnnnnnnnnnnnnnnnnnnnnnnnnnnnnnnnnnnnnnnnnnnnnnnnnnnnnnnnnnnnnnnnnnnnnnnnnnnnnnnnnnnnnnnnnnnnnnnnnnnnnnnnnnnnnnnnnnnnnnnnnnnnnnnnnnnnnnnnnnnnnnnnnnnnnnnnnnnnnnnnnnnnnnnnnnnnnnnnnnnnnnnnnnnnnnnnnnnnnnnnnnnnnnnnnnnnnnnnnnnnnnnnnnnnnnnnnnnnnnnnnnnnnnnnnnnnnnnnnnnnnnnnnnnnnnnnnnnnnnnnnnnnnnnnnnnnnnnnnnnnnnnnnnnnnnnnnnnnnnnnnnnnnnnnnnnnnnnnnnnnnnnnnnnnnnnnnnnnnnnnnnnnnnnnnnnnnnnnnnnnnnnnnnnnnnnnnnnnnnnnnnnnnnnnnnnnnnnnnnnnnnnnnnnnnnnnnnnnnnnnnnnnnnnnnnnnnnnnnnnnnnnnnnnnnnnnnnnnnnnnnnnnnnnnnnnnnnnnnnnnnnnnnnnnnnnnnnnnnnnnnnnnnnnnnnnnnnnnnnnnnnnnnnnnnnnnnnnnnnnnnnnnnnnnnnnnnnnnnnnnnnnnnnnnnnnnnnnnnnnnnnnnnnnnnnnnnnnnnnnnnnnnnnnnnnnnnnnnnnnnnnnnnnnnnnnnnnnnnnnnnnnnnnnnnnnnnnnnnnnnnnnnnnnnnnnnnnnnnnnnnnnnnnnnnnnnnnnnnnnnnnnnnnnnnnnnnnnnnnnnnnnnnnnnnnnnnnnnnnnnnnnnnnnnnnnnnnnnnnnnnnnnnnnnnnnnnnnnnnnnnnnnnnnnnnnnnnnnnnnnnnnnnnnnnnnnnnnnnnnnnnnnnnnnnnnnnnnnnnnnnnnnnnnnnnnnnnnnnnnnnnnnnnnnnnnnnnnnnnnnnnnnnnnnnnnnnnnnnnnnnnnnnnnnnnnnnnnnnnnnnnnnnnnnnnnnnnnnnnnnnnnnnnnnnnnnnnnnnnnnnnnnnnnnnnnnnnnnnnnnnnnnnnnnnnnnnnnnnnnnnnnnnnnnnnnnnnnnnnnnnnnnnnnnnnnnnnnnnnnnnnnnnnnnnnnnnnnnnnnnnnnnnnnnnnnnnnnnnnnnnnnnnnnnnnnnnnnnnnnnnnnnnnnnnnnnnnnnnnnnnnnnnnnnnnnnnnnnnnnnnnnnnnnnnnnnnnnnnnnnnnnnnnnnnnnnnnnnnnnnnnnnnnnnnnnnnnnnnnnnnnnnnnnnnnnnnnnnnnnnnnnnnnnnnnnnnnnnnnnnnnnnnnnnnnnnnnnnnnnnnnnnnnnnnnnnnnnnnnnnnnnnnnnnnnnnnnnnnnnnnnnnnnnnnnnnnnnnnnnnnnnnnnnnnnnnnnnnnnnnnnnnnnnnnnnnnnnnnnnnnnnnnnnnnnnnnnnnnnnnnnnnnnnnnnnnnnnnnnnnnnnnnnnnnnnnnnnnnnnnnnnnnnnnnnnnnnnnnnnnnnnnnnnnnnnnnnnnnnnnnnnnnnnnnnnnnnnnnnnnnnnnnnnnnnnnnnnnnnnnnnnnnnnnnnnnnnnnnnnnnnnnnnnnnnnnnnnnnnnnnnnnnnnnnnnnnnnnnnnnnnnnnnnnnnnnnnnnnnnnnnnnnnnnnnnnnnnnnnnnnnnnnnnnnnnnnnnnnnnnnnnnnnnnnnnnnnnnnnnnnnnnnnnnnnnnnnnnnnnnnnnnnnnnnnnnnnnnnnnnnnnnnnnnnnnnnnnnnnnnnnnnnnnnnnnnnnnnnnnnnnnnnnnnnnnnnnnnnnnnnnnnnnnnnnnnnnnnnnnnnnnnnnnnnnnnnnnnnnnnnnnnnnnnnnnnnnnnnnnnnnnnnnnnnnnnnnnnnnnnnnnnnnnnnnnnnnnnnnnnnnnnnnnnnnnnnnnnnnnnnnnnnnnnnnnnnnnnnnnnnnnnnnnnnnnnnnnnnnnnnnnnnnnnnnnnnnnnnnnnnnnnnnnnnnnnnnnnnnnnnnnnnnnnnnnnnnnnnnnnnnnnnnnnnnnnnnnnnnnnnnnnnnnnnnnnnnnnnnnnnnnnnnnnnnnnnnnnnnnnnnnnnnnnnnnnnnnnnnnnnnnnnnnnnnnnnnnnnnnnnnnnnnnnnnnnnnnnnnnnnnnnnnnnnnnnnnnnnnnnnnnnnnnnnnnnnnnnnnnnnnnnnnnnnnnnnnnnnnnnnnnnnnnnnnnnnnnnnnnnnnnnnnnnnnnnnnnnnnnnnnnnnnnnnnnnnnnnnnnnnnnnnnnnnnnnnnnnnnnnnnnnnnnnnnnnnnnnnnnnnnnnnnnnnnnnnnnnnnnnnnnnnnnnnnnnnnnnnnnnnnnnnnnnnnnnnnnnnnnnnnnnnnnnnnnnnnnnnnnnnnnnnnnnnnnnnnnnnnnnnnnnnnnnnnnnnnnnnnnnnnnnnnnnnnnnnnnnnnnnnnnnnnnnnnnnnnnnnnnnnnnnnnnnnnnnnnnnnnnnnnnnnnnnnnnnnnnnnnnnnnnnnnnnnnnnnnnnnnnnnnnnnnnnnnnnnnnnnnnnnnnnnnnnnnnnnnnnnnnnnnnnnnnnnnnnnnnnnnnnnnnnnnnnnnnnnnnnnnnnnnnnnnnnnnnnnnnnnnnnnnnnnnnnnnnnnnnnnnnnnnnnnnnnnnnnnnnnnnnnnnnnnnnnnnnnnnnnnnnnnnnnnnnnnnnnnnnnnnnnnnnnnnnnnnnnnnnnnnnnnnnnnnnnnnnnnnnnnnnnnnnnnnnnnnnnnnnnnnnnnnnnnnnnnnnnnnnnnnnnnnnnnnnnnnnnnnnnnnnnnnnnnnnnnnnnnnnnnnnnnnnnnnnnnnnnnnnnnnnnnnnnnnnnnnnnnnnnnnnnnnnnnnnnnnnnnnnnnnnnnnnnnnnnnnnnnnnnnnnnnnnnnnnnnnnnnnnnnnnnnnnnnnnnnnnnnnnnnnnnnnnnnnnnnnnnnnnnnnnnnnnnnnnnnnnnnnnnnnnnnnnnnnnnnnnnnnnnnnnnnnnnnnnnnnnnnnnnnnnnnnnnnnnnnnnnnnnnnnnnnnnnnnnnnnnnnnnnnnnnnnnnnnnnnnnnnnnnnnnnnnnnnnnnnnnnnnnnnnnnnnnnnnnnnnnnnnnnnnnnnnnnnnnnnnnnnnnnnnnnnnnnnnnnnnnnnnnnnnnnnnnnnnnnnnnnnnnnnnnnnnnnnnnnnnnnnnnnnnnnnnnnnnnnnnnnnnnnnnnnnnnnnnnnnnnnnnnnnnnnnnnnnnnnnnnnnnnnnnnnnnnnnnnnnnnnnnnnnnnnnnnnnnnnnnnnnnnnnnnnnnnnnnnnnnnnnnnnnnnnnnnnnnnnnnnnnnnnnnnnnnnnnnnnnnnnnnnnnnnnnnnnnnnnnnnnnnnnnnnnnnnnnnnnnnnnnnnnnnnnnnnnnnnnnnnnnnnnnnnnnnnnnnnnnnnnnnnnnnnnnnnnnnnnnnnnnnnnnnnnnnnnnnnnnnnnnnnnnnnnnnnnnnnnnnnnnnnnnnnnnnnnnnnnnnnnnnnnnnnnnnnnnnnnnnnnnnnnnnnnnnnnnnnnnnnnnnnnnnnnnnnnnnnnnnnnnnnnnnnnnnnnnnnnnnnnnnnnnnnnnnnnnnnnnnnnnnnnnnnnnnnnnnnnnnnnnnnnnnnnnnnnnnnnnnnnnnnnnnnnnnnnnnnnnnnnnnnnnnnnnnnnnnnnnnnnnnnnnnnnnnnnnnnnnnnnnnnnnnnnnnnnnnnnnnnnnnnnnnnnnnnnnnnnnnnnnnnnnnnnnnnnnnnnnnnnnnnnnnnnnnnnnnnnnnnnnnnnnnnnnnnnnnnnnnnnnnnnnnnnnnnnnnnnnnnnnnnnnnnnnnnnnnnnnnnnnnnnnnnnnnnnnnnnnnnnnnnnnnnnnnnnnnnnnnnnnnnnnnnnnnnnnnnnnnnnnnnnnnnnnnnnnnnnnnnnnnnnnnnnnnnnnnnnnnnnnnnnnnnnnnnnnnnnnnnnnnnnnnnnnnnnnnnnnnnnnnnnnnnnnnnnnnnnnnnnnnnnnnnnnnnnnnnnnnnnnnnnnnnnnnnnnnnnnnnnnnnnnnnnnnnnnnnnnnnnnnnnnnnnnnnnnnnnnnnnnnnnnnnnnnnnnnnnnnnnnnnnnnnnnnnnnnnnnnnnnnnnnnnnnnnnnnnnnnnnnnnnnnnnnnnnnnnnnnnnnnnnnnnnnnnnnnnnnnnnnnnnnnnnnnnnnnnnnnnnnnnnnnnnnnnnnnnnnnnnnnnnnnnnnnnnnnnnnnnnnnnnnnnnnnnnnnnnnnnnnnnnnnnnnnnnnnnnnnnnnnnnnnnnnnnnnnnnnnnnnnnnnnnnnnnnnnnnnnnnnnnnnnnnnnnnnnnnnnnnnnnnnnnnnnnnnnnnnnnnnnnnnnnnnnnnnnnnnnnnnnnnnnnnnnnnnnnnnnnnnnnnnnnnnnnnnnnnnnnnnnnnnnnnnnnnnnnnnnnnnnnnnnnnnnnnnnnnnnnnnnnnnnnnnnnnnnnnnnnnnnnnnnnnnnnnnnnnnnnnnnnnnnnnnnnnnnnnnnnnnnnnnnnnnnnnnnnnnnnnnnnnnnnnnnnnnnnnnnnnnnnnnnnnnnnnnnnnnnnnnnnnnnnnnnnnnnnnnnnnnnnnnnnnnnnnnnnnnnnnnnnnnnnnnnnnnnnnnnnnnnnnnnnnnnnnnnnnnnnnnnnnnnnnnnnnnnnnnnnnnnnnnnnnnnnnnnnnnnnnnnnnnnnnnnnnnnnnnnnnnnnnnnnnnnnnnnnnnnnnnnnnnnnnnnnnnnnnnnnnnnnnnnnnnnnnnnnnnnnnnnnnnnnnnnnnnnnnnnnnnnnnnnnnnnnnnnnnnnnnnnnnnnnnnnnnnnnnnnnnnnnnnnnnnnnnnnnnnnnnnnnnnnnnnnnnnnnnnnnnnnnnnnnnnnnnnnnnnnnnnnnnnnnnnnnnnnnnnnnnnnnnnnnnnnnnnnnnnnnnnnnnnnnnnnnnnnnnnnnnnnnnnnnnnnnnnnnnnnnnnnnnnnnnnnnnnnnnnnnnnnnnnnnnnnnnnnnnnnnnnnnnnnnnnnnnnnnnnnnnnnnnnnnnnnnnnnnnnnnnnnnnnnnnnnnnnnnnnnnnnnnnnnnnnnnnnnnnnnnnnnnnnnnnnnnnnnnnnnnnnnnnnnnnnnnnnnnnnnnnnnnnnnnnnnnnnnnnnnnnnnnnnnnnnnnnnnnnnnnnnnnnnnnnnnnnnnnnnnnnnnnnnnnnnnnnnnnnnnnnnnnnnnnnnnnnnnnnnnnnnnnnnnnnnnnnnnnnnnnnnnnnnnnnnnnnnnnnnnnnnnnnnnnnnnnnnnnnnnnnnnnnnnnnnnnnnnnnnnnnnnnnnnnnnnnnnnnnnnnnnnnnnnnnnnnnnnnnnnnnnnnnnnnnnnnnnnnnnnnnnnnnnnnnnnnnnnnnnnnnnnnnnnnnnnnnnnnnnnnnnnnnnnnnnnnnnnnnnnnnnnnnnnnnnnnnnnnnnnnnnnnnnnnnnnnnnnnnnnnnnnnnnnnnnnnnnnnnnnnnnnnnnnnnnnnnnnnnnnnnnnnnnnnnnnnnnnnnnnnnnnnnnnnnnnnnnnnnnnnnnnnnnnnnnnnnnnnnnnnnnnnnnnnnnnnnnnnnnnnnnnnnnnnnnnnnnnnnnnnnnnnnnnnnnnnnnnnnnnnnnnnnnnnnnnnnnnnnnnnnnnnnnnnnnnnnnnnnnnnnnnnnnnnnnnnnnnnnnnnnnnnnnnnnnnnnnnnnnnnnnnnnnnnnnnnnnnnnnnnnnnnnnnnnnnnnnnnnnnnnnnnnnnnnnnnnnnnnnnnnnnnnnnnnnnnnnnnnnnnnnnnnnnnnnnnnnnnnnnnnnnnnnnnnnnnnnnnnnnnnnnnnnnnnnnnnnnnnnnnnnnnnnnnnnnnnnnnnnnnnnnnnnnnnnnnnnnnnnnnnnnnnnnnnnnnnnnnnnnnnnnnnnnnnnnnnnnnnnnnnnnnnnnnnnnnnnnnnnnnnnnnnnnnnnnnnnnnnnnnnnnnnnnnnnnnnnnnnnnnnnnnnnnnnnnnnnnnnnnnnnnnnnnnnnnnnnnnnnnnnnnnnnnnnnnnnnnnnnnnnnnnnnnnnnnnnnnnnnnnnnnnnnnnnnnnnnnnnnnnnnnnnnnnnnnnnnnnnnnnnnnnnnnnnnnnnnnnnnnnnnnnnnnnnnnnnnnnnnnnnnnnnnnnnnnnnnnnnnnnnnnnnnnnnnnnnnnnnnnnnnnnnnnnnnnnnnnnnnnnnnnnnnnnnnnnnnnnnnnnnnnnnnnnnnnnnnnnnnnnnnnnnnnnnnnnnnnnnnnnnnnnnnnnnnnnnnnnnnnnnnnnnnnnnnnnnnnnnnnnnnnnnnnnnnnnnnnnnnnnnnnnnnnnnnnnnnnnnnnnnnnnnnnnnnnnnnnnnnnnnnnnnnnnnnnnnnnnnnnnnnnnnnnnnnnnnnnnnnnnnnnnnnnnnnnnnnnnnnnnnnnnnnnnnnnnnnnnnnnnnnnnnnnnnnnnnnnnnnnnnnnnnnnnnnnnnnnnnnnnnnnnnnnnnnnnnnnnnnnnnnnnnnnnnnnnnnnnnnnnnnnnnnnnnnnnnnnnnnnnnnnnnnnnnnnnnnnnnnnnnnnnnnnnnnnnnnnnnnnnnnnnnnnnnnnnnnnnnnnnnnnnnnnnnnnnnnnnnnnnnnnnnnnnnnnnnnnnnnnnnnnnnnnnnnnnnnnnnnnnnnnnnnnnnnnnnnnnnnnnnnnnnnnnnnnnnnnnnnnnnnnnnnnnnnnnnnnnnnnnnnnnnnnnnnnnnnnnnnnnnnnnnnnnnnnnnnnnnnnnnnnnnnnnnnnnnnnnnnnnnnnnnnnnnnnnnnnnnnnnnnnnnnnnnnnnnnnnnnnnnnnnnnnnnnnnnnnnnnnnnnnnnnnnnnnnnnnnnnnnnnnnnnnnnnnnnnnnnnnnnnnnnnnnnnnnnnnnnnnnnnnnnnnnnnnnnnnnnnnnnnnnnnnnnnnnnnnnnnnnnnnnnnnnnnnnnnnnnnnnnnnnnnnnnnnnnnnnnnnnnnnnnnnnnnnnnnnnnnnnnnnnnnnnnnnnnnnnnnnnnnnnnnnnnnnnnnnnnnnnnnnnnnnnnnnnnnnnnnnnnnnnnnnnnnnnnnnnnnnnnnnnnnnnnnnnnnnnnnnnnnnnnnnnnnnnnnnnnnnnnnnnnnnnnnnnnnnnnnnnnnnnnnnnnnnnnnnnnnnnnnnnnnnnnnnnnnnnnnnnnnnnnnnnnnnnnnnnnnnnnnnnnnnnnnnnnnnnnnnnnnnnnnnnnnnnnnnnnnnnnnnnnnnnnnnnnnnnnnnnnnnnnnnnnnnnnnnnnnnnnnnnnnnnnnnnnnnnnnnnnnnnnnnnnnnnnnnnnnnnnnnnnnnnnnnnnnnnnnnnnnnnnnnnnnnnnnnnnnnnnnnnnnnnnnnnnnnnnnnnnnnnnnnnnnnnnnnnnnnnnnnnnnnnnnnnnnnnnnnnnnnnnnnnnnnnnnnnnnnnnnnnnnnnnnnnnnnnnnnnnnnnnnnnnnnnnnnnnnnnnnnnnnnnnnnnnnnnnnnnnnnnnnnnnnnnnnnnnnnnnnnnnnnnnnnnnnnnnnnnnnnnnnnnnnnnnnnnnnnnnnnnnnnnnnnnnnnnnnnnnnnnnnnnnnnnnnnnnnnnnnnnnnnnnnnnnnnnnnnnnnnnnnnnnnnnnnnnnnnnnnnnnnnnnnnnnnnnnnnnnnnnnnnnnnnnnnnnnnnnnnnnnnnnnnnnnnnnnnnnnnnnnnnnnnnnnnnnnnnnnnnnnnnnnnnnnnnnnnnnnnnnnnnnnnnnnnnnnnnnnnnnnnnnnnnnnnnnnnnnnnnnnnnnnnnnnnnnnnnnnnnnnnnnnnnnnnnnnnnnnnnnnnnnnnnnnnnnnnnnnnnnnnnnnnnnnnnnnnnnnnnnnnnnnnnnnnnnnnnnnnnnnnnnnnnnnnnnnnnnnnnnnnnnnnnnnnnnnnnnnnnnnnnnnnnnnnnnnnnnnnnnnnnnnnnnnnnnnnnnnnnnnnnnnnnnnnnnnnnnnnnnnnnnnnnnnnnnnnnnnnnnnnnnnnnnnnnnnnnnnnnnnnnnnnnnnnnnnnnnnnnnnnnnnnnnnnnnnnnnnnnnnnnnnnnnnnnnnnnnnnnnnnnnnnnnnnnnnnnnnnnnnnnnnnnnnnnnnnnnnnnnnnnnnnnnnnnnnnnnnnnnnnnnnnnnnnnnnnnnnnnnnnnnnnnnnnnnnnnnnnnnnnnnnnnnnnnnnnnnnnnnnnnnnnnnnnnnnnnnnnnnnnnnnnnnnnnnnnnnnnnnnnnnnnnnnnnnnnnnnnnnnnnnnnnnnnnnnnnnnnnnnnnnnnnnnnnnnnnnnnnnnnnnnnnnnnnnnnnnnnnnnnnnnnnnnnnnnnnnnnnnnnnnnnnnnnnnnnnnnnnnnnnnnnnnnnnnnnnnnnnnnnnnnnnnnnnnnnnnnnnnnnnnnnnnnnnnnnnnnnnnnnnnnnnnnnnnnnnnnnnnnnnnnnnnnnnnnnnnnnnnnnnnnnnnnnnnnnnnnnnnnnnnnnnnnnnnnnnnnnnnnnnnnnnnnnnnnnnnnnnnnnnnnnnnnnnnnnnnnnnnnnnnnnnnnnnnnnnnnnnnnnnnnnnnnnnnnnnnnnnnnnnnnnnnnnnnnnnnnnnnnnnnnnnnnnnnnnnnnnnnnnnnnnnnnnnnnnnnnnnnnnnnnnnnnnnnnnnnnnnnnnnnnnnnnnnnnnnnnnnnnnnnnnnnnnnnnnnnnnnnnnnnnnnnnnnnnnnnnnnnnnnnnnnnnnnnnnnnnnnnnnnnnnnnnnnnnnnnnnnnnnnnnnnnnnnnnnnnnnnnnnnnnnnnnnnnnnnnnnnnnnnnnnnnnnnnnnnnnnnnnnnnnnnnnnnnnnnnnnnnnnnnnnnnnnnnnnnnnnnnnnnnnnnnnnnnnnnnnnnnnnnnnnnnnnnnnnnnnnnnnnnnnnnnnnnnnnnnnnnnnnnnnnnnnnnnnnnnnnnnnnnnnnnnnnnnnnnnnnnnnnnnnnnnnnnnnnnnnnnnnnnnnnnnnnnnnnnnnnnnnnnnnnnnnnnnnnnnnnnnnnnnnnnnnnnnnnnnnnnnnnnnnnnnnnnnnnnnnnnnnnnnnnnnnnnnnnnnnnnnnnnnnnnnnnnnnnnnnnnnnnnnnnnnnnnnnnnnnnnnnnnnnnnnnnnnnnnnnnnnnnnnnnnnnnnnnnnnnnnnnnnnnnnnnnnnnnnnnnnnnnnnnnnnnnnnnnnnnnnnnnnnnnnnnnnnnnnnnnnnnnnnnnnnnnnnnnnnnnnnnnnnnnnnnnnnnnnnnnnnnnnnnnnnnnnnnnnnnnnnnnnnnnnnnnnnnnnnnnnnnnnnnnnnnnnnnnnnnnnnnnnnnnnnnnnnnnnnnnnnnnnnnnnnnnnnnnnnnnnnnnnnnnnnnnnnnnnnnnnnnnnnnnnnnnnnnnnnnnnnnnnnnnnnnnnnnnnnnnnnnnnnnnnnnnnnnnnnnnnnnnnnnnnnnnnnnnnnnnnnnnnnnnnnnnnnnnnnnnnnnnnnnnnnnnnnnnnnnnnnnnnnnnnnnnnnnnnnnnnnnnnnnnnnnnnnnnnnnnnnnnnnnnnnnnnnnnnnnnnnnnnnnnnnnnnnnnnnnnnnnnnnnnnnnnnnnnnnnnnnnnnnnnnnnnnnnnnnnnnnnnnnnnnnnnnnnnnnnnnnnnnnnnnnnnnnnnnnnnnnnnnnnnnnnnnnnnnnnnnnnnnnnnnnnnnnnnnnnnnnnnnnnnnnnnnnnnnnnnnnnnnnnnnnnnnnnnnnnnnnnnnnnnnnnnnnnnnnnnnnnnnnnnnnnnnnnnnnnnnnnnnnnnnnnnnnnnnnnnnnnnnnnnnnnnnnnnnnnnnnnnnnnnnnnnnnnnnnnnnnnnnnnnnnnnnnnnnnnnnnnnnnnnnnnnnnnnnnnnnnnnnnnnnnnnnnnnnnnnnnnnnnnnnnnnnnnnnnnnnnnnnnnnnnnnnnnnnnnnnnnnnnnnnnnnnnnnnnnnnnnnnnnnnnnnnnnnnnnnnnnnnnnnnnnnnnnnnnnnnnnnnnnnnnnnnnnnnnnnnnnnnnnnnnnnnnnnnnnnnnnnnnnnnnnnnnnnnnnnnnnnnnnnnnnnnnnnnnnnnnnnnnnnnnnnnnnnnnnnnnnnnnnnnnnnnnnnnnnnnnnnnnnnnnnnnnnnnnnnnnnnnnnnnnnnnnnnnnnnnnnnnnnnnnnnnnnnnnnnnnnnnnnnnnnnnnnnnnnnnnnnnnnnnnnnnnnnnnnnnnnnnnnnnnnnnnnnnnnnnnnnnnnnnnnnnnnnnnnnnnnnnnnnnnnnnnnnnnnnnnnnnnnnnnnnnnnnnnnnnnnnnnnnnnnnnnnnnnnnnnnnnnnnnnnnnnnnnnnnnnnnnnnnnnnnnnnnnnnnnnnnnnnnnnnnnnnnnnnnnnnnnnnnnnnnnnnnnnnnnnnnnnnnnnnnnnnnnnnnnnnnnnnnnnnnnnnnnnnnnnnnnnnnnnnnnnnnnnnnnnnnnnnnnnnnnnnnnnnnnnnnnnnnnnnnnnnnnnnnnnnnnnnnnnnnnnnnnnnnnnnnnnnnnnnnnnnnnnnnnnnnnnnnnnnnnnnnnnnnnnnnnnnnnnnnnnnnnnnnnnnnnnnnnnnnnnnnnnnnnnnnnnnnnnnnnnnnnnnnnnnnnnnnnnnnnnnnnnnnnnnnnnnnnnnnnnnnnnnnnnnnnnnnnnnnnnnnnnnnnnnnnnnnnnnnnnnnnnnnnnnnnnnnnnnnnnnnnnnnnnnnnnnnnnnnnnnnnnnnnnnnnnnnnnnnnnnnnnnnnnnnnnnnnnnnnnnnnnnnnnnnnnnnnnnnnnnnnnnnnnnnnnnnnnnnnnnnnnnnnnnnnnnnnnnnnnnnnnnnnnnnnnnnnnnnnnnnnnnnnnnnnnnnnnnnnnnnnnnnnnnnnnnnnnnnnnnnnnnnnnnnnnnnnnnnnnnnnnnnnnnnnnnnnnnnnnnnnnnnnnnnnnnnnnnnnnnnnnnnnnnnnnnnnnnnnnnnnnnnnnnnnnnnnnnnnnnnnnnnnnnnnnnnnnnnnnnnnnnnnnnnnnnnnnnnnnnnnnnnnnnnnnnnnnnnnnnnnnnnnnnnnnnnnnnnnnnnnnnnnnnnnnnnnnnnnnnnnnnnnnnnnnnnnnnnnnnnnnnnnnnnnnnnnnnnnnnnnnnnnnnnnnnnnnnnnnnnnnnnnnnnnnnnnnnnnnnnnnnnnnnnnnnnnnnnnnnnnnnnnnnnnnnnnnnnnnnnnnnnnnnnnnnnnnnnnnnnnnnnnnnnnnnnnnnnnnnnnnnnnnnnnnnnnnnnnnnnnnnnnnnnnnnnnnnnnnnnnnnnnnnnnnnnnnnnnnnnnnnnnnnnnnnnnnnnnnnnnnnnnnnnnnnnnnnnnnnnnnnnnnnnnnnnnnnnnnnnnnnnnnnnnnnnnnnnnnnnnnnnnnnnnnnnnnnnnnnnnnnnnnnnnnnnnnnnnnnnnnnnnnnnnnnnnnnnnnnnnnnnnnnnnnnnnnnnnnnnnnnnnnnnnnnnnnnnnnnnnnnnnnnnnnnnnnnnnnnnnnnnnnnnnnnnnnnnnnnnnnnnnnnnnnnnnnnnnnnnnnnnnnnnnnnnnnnnnnnnnnnnnnnnnnnnnnnnnnnnnnnnnnnnnnnnnnnnnnnnnnnnnnnnnnnnnnnnnnnnnnnnnnnnnnnnnnnnnnnnnnnnnnnnnnnnnnnnnnnnnnnnnnnnnnnnnnnnnnnnnnnnnnnnnnnnnnnnnnnnnnnnnnnnnnnnnnnnnnnnnnnnnnnnnnnnnnnnnnnnnnnnnnnnnnnnnnnnnnnnnnnnnnnnnnnnnnnnnnnnnnnnnnnnnnnnnnnnnnnnnnnnnnnnnnnnnnnnnnnnnnnnnnnnnnnnnnnnnnnnnnnnnnnnnnnnnnnnnnnnnnnnnnnnnnnnnnnnnnnnnnnnnnnnnnnnnnnnnnnnnnnnnnnnnnnnnnnnnnnnnnnnnnnnnnnnnnnnnnnnnnnnnnnnnnnnnnnnnnnnnnnnnnnnnnnnnnnnnnnnnnnnnnnnnnnnnnnnnnnnnnnnnnnnnnnnnnnnnnnnnnnnnnnnnnnnnnnnnnnnnnnnnnnnnnnnnnnnnnnnnnnnnnnnnnnnnnnnnnnnnnnnnnnnnnnnnnnnnnnnnnnnnnnnnnnnnnnnnnnnnnnnnnnnnnnnnnnnnnnnnnnnnnnnnnnnnnnnnnnnnnnnnnnnnnnnnnnnnnnnnnnnnnnnnnnnnnnnnnnnnnnnnnnnnnnnnnnnnnnnnnnnnnnnnnnnnnnnnnnnnnnnnnnnnnnnnnnnnnnnnnnnnnnnnnnnnnnnnnnnnnnnnnnnnnnnnnnnnnnnnnnnnnnnnnnnnnnnnnnnnnnnnnnnnnnnnnnnnnnnnnnnnnnnnnnnnnnnnnnnnnnnnnnnnnnnnnnnnnnnnnnnnnnnnnnnnnnnnnnnnnnnnnnnnnnnnnnnnnnnnnnnnnnnnnnnnnnnnnnnnnnnnnnnnnnnnnnnnnnnnnnnnnnnnnnnnnnnnnnnnnnnnnnnnnnnnnnnnnnnnnnnnnnnnnnnnnnnnnnnnnnnnnnnnnnnnnnnnnnnnnnnnnnnnnnnnnnnnnnnnnnnnnnnnnnnnnnnnnnnnnnnnnnnnnnnnnnnnnnnnnnnnnnnnnnnnnnnnnnnnnnnnnnnnnnnnnnnnnnnnnnnnnnnnnnnnnnnnnnnnnnnnnnnnnnnnnnnnnnnnnnnnnnnnnnnnnnnnnnnnnnnnnnnnnnnnnnnnnnnnnnnnnnnnnnnnnnnnnnnnnnnnnnnnnnnnnnnnnnnnnnnnnnnnnnnnnnnnnnnnnnnnnnnnnnnnnnnnnnnnnnnnnnnnnnnnnnnnnnnnnnnnnnnnnnnnnnnnnnnnnnnnnnnnnnnnnnnnnnnnnnnnnnnnnnnnnnnnnnnnnnnnnnnnnnnnnnnnnnnnnnnnnnnnnnnnnnnnnnnnnnnnnnnnnnnnnnnnnnnnnnnnnnnnnnnnnnnnnnnnnnnnnnnnnnnnnnnnnnnnnnnnnnnnnnnnnnnnnnnnnnnnnnnnnnnnnnnnnnnnnnnnnnnnnnnnnnnnnnnnnnnnnnnnnnnnnnnnnnnnnnnnnnnnnnnnnnnnnnnnnnnnnnnnnnnnnnnnnnnnnnnnnnnnnnnnnnnnnnnnnnnnnnnnnnnnnnnnnnnnnnnnnnnnnnnnnnnnnnnnnnnnnnnnnnnnnnnnnnnnnnnnnnnnnnnnnnnnnnnnnnnnnnnnnnnnnnnnnnnnnnnnnnnnnnnnnnnnnnnnnnnnnnnnnnnnnnnnnnnnnnnnnnnnnnnnnnnnnnnnnnnnnnnnnnnnnnnnnnnnnnnnnnnnnnnnnnnnnnnnnnnnnnnnnnnnnnnnnnnnnnnnnnnnnnnnnnnnnnnnnnnnnnnnnnnnnnnnnnnnnnnnnnnnnnnnnnnnnnnnnnnnnnnnnnnnnnnnnnnnnnnnnnnnnnnnnnnnnnnnnnnnnnnnnnnnnnnnnnnnnnnnnnnnnnnnnnnnnnnnnnnnnnnnnnnnnnnnnnnnnnnnnnnnnnnnnnnnnnnnnnnnnnnnnnnnnnnnnnnnnnnnnnnnnnnnnnnnnnnnnnnnnnnnnnnnnnnnnnnnnnnnnnnnnnnnnnnnnnnnnnnnnnnnnnnnnnnnnnnnnnnnnnnnnnnnnnnnnnnnnnnnnnnnnnnnnnnnnnnnnnnnnnnnnnnnnnnnnnnnnnnnnnnnnnnnnnnnnnnnnnnnnnnnnnnnnnnnnnnnnnnnnnnnnnnnnnnnnnnnnnnnnnnnnnnnnnnnnnnnnnnnnnnnnnnnnnnnnnnnnnnnnnnnnnnnnnnnnnnnnnnnnnnnnnnnnnnnnnnnnnnnnnnnnnnnnnnnnnnnnnnnnnnnnnnnnnnnnnnnnnnnnnnnnnnnnnnnnnnnnnnnnnnnnnnnnnnnnnnnnnnnnnnnnnnnnnnnnnnnnnnnnnnnnnnnnnnnnnnnnnnnnnnnnnnnnnnnnnnnnnnnnnnnnnnnnnnnnnnnnnnnnnnnnnnnnnnnnnnnnnnnnnnnnnnnnnnnnnnnnnnnnnnnnnnnnnnnnnnnnnnnnnnnnnnnnnnnnnnnnnnnnnnnnnnnnnnnnnnnnnnnnnnnnnnnnnnnnnnnnnnnnnnnnnnnnnnnnnnnnnnnnnnnnnnnnnnnnnnnnnnnnnnnnnnnnnnnnnnnnnnnnnnnnnnnnnnnnnnnnnnnnnnnnnnnnnnnnnnnnnnnnnnnnnnnnnnnnnnnnnnnnnnnnnnnnnnnnnnnnnnnnnnnnnnnnnnnnnnnnnnnnnnnnnnnnnnnnnnnnnnnnnnnnnnnnnnnnnnnnnnnnnnnnnnnnnnnnnnnnnnnnnnnnnnnnnnnnnnnnnnnnnnnnnnnnnnnnnnnnnnnnnnnnnnnnnnnnnnnnnnnnnnnnnnnnnnnnnnnnnnnnnnnnnnnnnnnnnnnnnnnnnnnnnnnnnnnnnnnnnnnnnnnnnnnnnnnnnnnnnnnnnnnnnnnnnnnnnnnnnnnnnnnnnnnnnnnnnnnnnnnnnnnnnnnnnnnnnnnnnnnnnnnnnnnnnnnnnnnnnnnnnnnnnnnnnnnnnnnnnnnnnnnnnnnnnnnnnnnnnnnnnnnnnnnnnnnnnnnnnnnnnnnnnnnnnnnnnnnnnnnnnnnnnnnnnnnnnnnnnnnnnnnnnnnnnnnnnnnnnnnnnnnnnnnnnnnnnnnnnnnnnnnnnnnnnnnnnnnnnnnnnnnnnnnnnnnnnnnnnnnnnnnnnnnnnnnnnnnnnnnnnnnnnnnnnnnnnnnnnnnnnnnnnnnnnnnnnnnnnnnnnnnnnnnnnnnnnnnnnnnnnnnnnnnnnnnnnnnnnnnnnnnnnnnnnnnnnnnnnnnnnnnnnnnnnnnnnnnnnnnnnnnnnnnnnnnnnnnnnnnnnnnnnnnnnnnnnnnnnnnnnnnnnnnnnnnnnnnnnnnnnnnnnnnnnnnnnnnnnnnnnnnnnnnnnnnnnnnnnnnnnnnnnnnnnnnnnnnnnnnnnnnnnnnnnnnnnnnnnnnnnnnnnnnnnnnnnnnnnnnnnnnnnnnnnnnnnnnnnnnnnnnnnnnnnnnnnnnnnnnnnnnnnnnnnnnnnnnnnnnnnnnnnnnnnnnnnnnnnnnnnnnnnnnnnnnnnnnnnnnnnnnnnnnnnnnnnnnnnnnnnnnnnnnnnnnnnnnnnnnnnnnnnnnnnnnnnnnnnnnnnnnnnnnnnnnnnnnnnnnnnnnnnnnnnnnnnnnnnnnnnnnnnnnnnnnnnnnnnnnnnnnnnnnnnnnnnnnnnnnnnnnnnnnnnnnnnnnnnnnnnnnnnnnnnnnnnnnnnnnnnnnnnnnnnnnnnnnnnnnnnnnnnnnnnnnnnnnnnnnnnnnnnnnnnnnnnnnnnnnnnnnnnnnnnnnnnnnnnnnnnnnnnnnnnnnnnnnnnnnnnnnnnnnnnnnnnnnnnnnnnnnnnnnnnnnnnnnnnnnnnnnnnnnnnnnnnnnnnnnnnnnnnnnnnnnnnnnnnnnnnnnnnnnnnnnnnnnnnnnnnnnnnnnnnnnnnnnnnnnnnnnnnnnnnnnnnnnnnnnnnnnnnnnnnnnnnnnnnnnnnnnnnnnnnnnnnnnnnnnnnnnnnnnnnnnnnnnnnnnnnnnnnnnnnnnnnnnnnnnnnnnnnnnnnnnnnnnnnnnnnnnnnnnnnnnnnnnnnnnnnnnnnnnnnnnnnnnnnnnnnnnnnnnnnnnnnnnnnnnnnnnnnnnnnnnnnnnnnnnnnnnnnnnnnnnnnnnnnnnnnnnnnnnnnnnnnnnnnnnnnnnnnnnnnnnnnnnnnnnnnnnnnnnnnnnnnnnnnnnnnnnnnnnnnnnnnnnnnnnnnnnnnnnnnnnnnnnnnnnnnnnnnnnnnnnnnnnnnnnnnnnnnnnnnnnnnnnnnnnnnnnnnnnnnnnnnnnnnnnnnnnnnnnnnnnnnnnnnnnnnnnnnnnnnnnnnnnnnnnnnnnnnnnnnnnnnnnnnnnnnnnnnnnnnnnnnnnnnnnnnnnnnnnnnnnnnnnnnnnnnnnnnnnnnnnnnnnnnnnnnnnnnnnnnnnnnnnnnnnnnnnnnnnnnnnnnnnnnnnnnnnnnnnnnnnnnnnnnnnnnnnnnnnnnnnnnnnnnnnnnnnnnnnnnnnnnnnnnnnnnnnnnnnnnnnnnnnnnnnnnnnnnnnnnnnnnnnnnnnnnnnnnnnnnnnnnnnnnnnnnnnnnnnnnnnnnnnnnnnnnnnnnnnnnnnnnnnnnnnnnnnnnnnnnnnnnnnnnnnnnnnnnnnnnnnnnnnnnnnnnnnnnnnnnnnnnnnnnnnnnnnnnnnnnnnnnnnnnnnnnnnnnnnnnnnnnnnnnnnnnnnnnnnnnnnnnnnnnnnnnnnnnnnnnnnnnnnnnnnnnnnnnnnnnnnnnnnnnnnnnnnnnnnnnnnnnnnnnnnnnnnnnnnnnnnnnnnnnnnnnnnnnnnnnnnnnnnnnnnnnnnnnnnnnnnnnnnnnnnnnnnnnnnnnnnnnnnnnnnnnnnnnnnnnnnnnnnnnnnnnnnnnnnnnnnnnnnnnnnnnnnnnnnnnnnnnnnnnnnnnnnnnnnnnnnnnnnnnnnnnnnnnnnnnnnnnnnnnnnnnnnnnnnnnnnnnnnnnnnnnnnnnnnnnnnnnnnnnnnnnnnnnnnnnnnnnnnnnnnnnnnnnnnnnnnnnnnnnnnnnnnnnnnnnnnnnnnnnnnnnnnnnnnnnnnnnnnnnnnnnnnnnnnnnnnnnnnnnnnnnnnnnnnnnnnnnnnnnnnnnnnnnnnnnnnnnnnnnnnnnnnnnnnnnnnnnnnnnnnnnnnnnnnnnnnnnnnnnnnnnnnnnnnnnnnnnnnnnnnnnnnnnnnnnnnnnnnnnnnnnnnnnnnnnnnnnnnnnnnnnnnnnnnnnnnnnnnnnnnnnnnnnnnnnnnnnnnnnnnnnnnnnnnnnnnnnnnnnnnnnnnnnnnnnnnnnnnnnnnnnnnnnnnnnnnnnnnnnnnnnnnnnnnnnnnnnnnnnnnnnnnnnnnnnnnnnnnnnnnnnnnnnnnnnnnnnnnnnnnnnnnnnnnnnnnnnnnnnnnnnnnnnnnnnnnnnnnnnnnnnnnnnnnnnnnnnnnnnnnnnnnnnnnnnnnnnnnnnnnnnnnnnnnnnnnnnnnnnnnnnnnnnnnnnnnnnnnnnnnnnnnnnnnnnnnnnnnnnnnnnnnnnnnnnnnnnnnnnnnnnnnnnnnnnnnnnnnnnnnnnnnnnnnnnnnnnnnnnnnnnnnnnnnnnnnnnnnnnnnnnnnnnnnnnnnnnnnnnnnnnnnnnnnnnnnnnnnnnnnnnnnnnnnnnnnnnnnnnnnnnnnnnnnnnnnnnnnnnnnnnnnnnnnnnnnnnnnnnnnnnnnnnnnnnnnnnnnnnnnnnnnnnnnnnnnnnnnnnnnnnnnnnnnnnnnnnnnnnnnnnnnnnnnnnnnnnnnnnnnnnnnnnnnnnnnnnnnnnnnnnnnnnnnnnnnnnnnnnnnnnnnnnnnnnnnnnnnnnnnnnnnnnnnnnnnnnnnnnnnnnnnnnnnnnnnnnnnnnnnnnnnnnnnnnnnnnnnnnnnnnnnnnnnnnnnnnnnnnnnnnnnnnnnnnnnnnnnnnnnnnnnnnnnnnnnnnnnnnnnnnnnnnnnnnnnnnnnnnnnnnnnnnnnnnnnnnnnnnnnnnnnnnnnnnnnnnnnnnnnnnnnnnnnnnnnnnnnnnnnnnnnnnnnnnnnnnnnnnnnnnnnnnnnnnnnnnnnnnnnnnnnnnnnnnnnnnnnnnnnnnnnnnnnnnnnnnnnnnnnnnnnnnnnnnnnnnnnnnnnnnnnnnnnnnnnnnnnnnnnnnnnnnnnnnnnnnnnnnnnnnnnnnnnnnnnnnnnnnnnnnnnnnnnnnnnnnnnnnnnnnnnnnnnnnnnnnnnnnnnnnnnnnnnnnnnnnnnnnnnnnnnnnnnnnnnnnnnnnnnnnnnnnnnnnnnnnnnnnnnnnnnnnnnnnnnnnnnnnnnnnnnnnnnnnnnnnnnnnnnnnnnnnnnnnnnnnnnnnnnnnnnnnnnnnnnnnnnnnnnnnnnnnnnnnnnnnnnnnnnnnnnnnnnnnnnnnnnnnnnnnnnnnnnnnnnnnnnnnnnnnnnnnnnnnnnnnnnnnnnnnnnnnnnnnnnnnnnnnnnnnnnnnnnnnnnnnnnnnnnnnnnnnnnnnnnnnnnnnnnnnnnnnnnnnnnnnnnnnnnnnnnnnnnnnnnnnnnnnnnnnnnnnnnnnnnnnnnnnnnnnnnnnnnnnnnnnnnnnnnnnnnnnnnnnnnnnnnnnnnnnnnnnnnnnnnnnnnnnnnnnnnnnnnnnnnnnnnnnnnnnnnnnnnnnnnnnnnnnnnnnnnnnnnnnnnnnnnnnnnnnnnnnnnnnnnnnnnnnnnnnnnnnnnnnnnnnnnnnnnnnnnnnnnnnnnnnnnnnnnnnnnnnnnnnnnnnnnnnnnnnnnnnnnnnnnnnnnnnnnnnnnnnnnnnnnnnnnnnnnnnnnnnnnnnnnnnnnnnnnnnnnnnnnnnnnnnnnnnnnnnnnnnnnnnnnnnnnnnnnnnnnnnnnnnnnnnnnnnnnnnnnnnnnnnnnnnnnnnnnnnnnnnnnnnnnnnnnnnnnnnnnnnnnnnnnnnnnnnnnnnnnnnnnnnnnnnnnnnnnnnnnnnnnnnnnnnnnnnnnnnnnnnnnnnnnnnnnnnnnnnnnnnnnnnnnnnnnnnnnnnnnnnnnnnnnnnnnnnnnnnnnnnnnnnnnnnnnnnnnnnnnnnnnnnnnnnnnnnnnnnnnnnnnnnnnnnnnnnnnnnnnnnnnnnnnnnnnnnnnnnnnnnnnnnnnnnnnnnnnnnnnnnnnnnnnnnnnnnnnnnnnnnnnnnnnnnnnnnnnnnnnnnnnnnnnnnnnnnnnnnnnnnnnnnnnnnnnnnnnnnnnnnnnnnnnnnnnnnnnnnnnnnnnnnnnnnnnnnnnnnnnnnnnnnnnnnnnnnnnnnnnnnnnnnnnnnnnnnnnnnnnnnnnnnnnnnnnnnnnnnnnnnnnnnnnnnnnnnnnnnnnnnnnnnnnnnnnnnnnnnnnnnnnnnnnnnnnnnnnnnnnnnnnnnnnnnnnnnnnnnnnnnnnnnnnnnnnnnnnnnnnnnnnnnnnnnnnnnnnnnnnnnnnnnnnnnnnnnnnnnnnnnnnnnnnnnnnnnnnnnnnnnnnnnnnnnnnnnnnnnnnnnnnnnnnnnnnnnnnnnnnnnnnnnnnnnnnnnnnnnnnnnnnnnnnnnnnnnnnnnnnnnnnnnnnnnnnnnnnnnnnnnnnnnnnnnnnnnnnnnnnnnnnnnnnnnnnnnnnnnnnnnnnnnnnnnnnnnnnnnnnnnnnnnnnnnnnnnnnnnnnnnnnnnnnnnnnnnnnnnnnnnnnnnnnnnnnnnnnnnnnnnnnnnnnnnnnnnnnnnnnnnnnnnnnnnnnnnnnnnnnnnnnnnnnnnnnnnnnnnnnnnnnnnnnnnnnnnnnnnnnnnnnnnnnnnnnnnnnnnnnnnnnnnnnnnnnnnnnnnnnnnnnnnnnnnnnnnnnnnnnnnnnnnnnnnnnnnnnnnnnnnnnnnnnnnnnnnnnnnnnnnnnnnnnnnnnnnnnnnnnnnnnnnnnnnnnnnnnnnnnnnnnnnnnnnnnnnnnnnnnnnnnnnnnnnnnnnnnnnnnnnnnnnnnnnnnnnnnnnnnnnnnnnnnnnnnnnnnnnnnnnnnnnnnnnnnnnnnnnnnnnnnnnnnnnnnnnnnnnnnnnnnnnnnnnnnnnnnnnnnnnnnnnnnnnnnnnnnnnnnnnnnnnnnnnnnnnnnnnnnnnnnnnnnnnnnnnnnnnnnnnnnnnnnnnnnnnnnnnnnnnnnnnnnnnnnnnnnnnnnnnnnnnnnnnnnnnnnnnnnnnnnnnnnnnnnnnnnnnnnnnnnnnnnnnnnnnnnnnnnnnnnnnnnnnnnnnnnnnnnnnnnnnnnnnnnnnnnnnnnnnnnnnnnnnnnnnnnnnnnnnnnnnnnnnnnnnnnnnnnnnnnnnnnnnnnnnnnnnnnnnnnnnnnnnnnnnnnnnnnnnnnnnnnnnnnnnnnnnnnnnnnnnnnnnnnnnnnnnnnnnnnnnnnnnnnnnnnnnnnnnnnnnnnnnnnnnnnnnnnnnnnnnnnnnnnnnnnnnnnnnnnnnnnnnnnnnnnnnnnnnnnnnnnnnnnnnnnnnnnnnnnnnnnnnnnnnnnnnnnnnnnnnnnnnnnnnnnnnnnnnnnnnnnnnnnnnnnnnnnnnnnnnnnnnnnnnnnnnnnnnnnnnnnnnnnnnnnnnnnnnnnnnnnnnnnnnnnnnnnnnnnnnnnnnnnnnnnnnnnnnnnnnnnnnnnnnnnnnnnnnnnnnnnnnnnnnnnnnnnnnnnnnnnnnnnnnnnnnnnnnnnnnnnnnnnnnnnnnnnnnnnnnnnnnnnnnnnnnnnnnnnnnnnnnnnnnnnnnnnnnnnnnnnnnnnnnnnnnnnnnnnnnnnnnnnnnnnnnnnnnnnnnnnnnnnnnnnnnnnnnnnnnnnnnnnnnnnnnnnnnnnnnnnnnnnnnnnnnnnnnnnnnnnnnnnnnnnnnnnnnnnnnnnnnnnnnnnnnnnnnnnnnnnnnnnnnnnnnnnnnnnnnnnnnnnnnnnnnnnnnnnnnnnnnnnnnnnnnnnnnnnnnnnnnnnnnnnnnnnnnnnnnnnnnnnnnnnnnnnnnnnnnnnnnnnnnnnnnnnnnnnnnnnnnnnnnnnnnnnnnnnnnnnnnnnnnnnnnnnnnnnnnnnnnnnnnnnnnnnnnnnnnnnnnnnnnnnnnnnnnnnnnnnnnnnnnnnnnnnnnnnnnnnnnnnnnnnnnnnnnnnnnnnnnnnnnnnnnnnnnnnnnnnnnnnnnnnnnnnnnnnnnnnnnnnnnnnnnnnnnnnnnnnnnnnnnnnnnnnnnnnnnnnnnnnnnnnnnnnnnnnnnnnnnnnnnnnnnnnnnnnnnnnnnnnnnnnnnnnnnnnnnnnnnnnnnnnnnnnnnnnnnnnnnnnnnnnnnnnnnnnnnnnnnnnnnnnnnnnnnnnnnnnnnnnnnnnnnnnnnnnnnnnnnnnnnnnnnnnnnnnnnnnnnnnnnnnnnnnnnnnnnnnnnnnnnnnnnnnnnnnnnnnnnnnnnnnnnnnnnnnnnnnnnnnnnnnnnnnnnnnnnnnnnnnnnnnnnnnnnnnnnnnnnnnnnnnnnnnnnnnnnnnnnnnnnnnnnnnnnnnnnnnnnnnnnnnnnnnnnnnnnnnnnnnnnnnnnnnnnnnnnnnnnnnnnnnnnnnnnnnnnnnnnnnnnnnnnnnnnnnnnnnnnnnnnnnnnnnnnnnnnnnnnnnnnnnnnnnnnnnnnnnnnnnnnnnnnnnnnnnnnnnnnnnnnnnnnnnnnnnnnnnnnnnnnnnnnnnnnnnnnnnnnnnnnnnnnnnnnnnnnnnnnnnnnnnnnnnnnnnnnnnnnnnnnnnnnnnnnnnnnnnnnnnnnnnnnnnnnnnnnnnnnnnnnnnnnnnnnnnnnnnnnnnnnnnnnnnnnnnnnnnnnnnnnnnnnnnnnnnnnnnnnnnnnnnnnnnnnnnnnnnnnnnnnnnnnnnnnnnnnnnnnnnnnnnnnnnnnnnnnnnnnnnnnnnnnnnnnnnnnnnnnnnnnnnnnnnnnnnnnnnnnnnnnnnnnnnnnnnnnnnnnnnnnnnnnnnnnnnnnnnnnnnnnnnnnnnnnnnnnnnnnnnnnnnnnnnnnnnnnnnnnnnnnnnnnnnnnnnnnnnnnnnnnnnnnnnnnnnnnnnnnnnnnnnnnnnnnnnnnnnnnnnnnnnnnnnnnnnnnnnnnnnnnnnnnnnnnnnnnnnnnnnnnnnnnnnnnnnnnnnnnnnnnnnnnnnnnnnnnnnnnnnnnnnnnnnnnnnnnnnnnnnnnnnnnnnnnnnnnnnnnnnnnnnnnnnnnnnnnnnnnnnnnnnnnnnnnnnnnnnnnnnnnnnnnnnnnnnnnnnnnnnnnnnnnnnnnnnnnnnnnnnnnnnnnnnnnnnnnnnnnnnnnnnnnnnnnnnnnnnnnnnnnnnnnnnnnnnnnnnnnnnnnnnnnnnnnnnnnnnnnnnnnnnnnnnnnnnnnnnnnnnnnnnnnnnnnnnnnnnnnnnnnnnnnnnnnnnnnnnnnnnnnnnnnnnnnnnnnnnnnnnnnnnnnnnnnnnnnnnnnnnnnnnnnnnnnnnnnnnnnnnnnnnnnnnnnnnnnnnnnnnnnnnnnnnnnnnnnnnnnnnnnnnnnnnnnnnnnnnnnnnnnnnnnnnnnnnnnnnnnnnnnnnnnnnnnnnnnnnnnnnnnnnnnnnnnnnnnnnnnnnnnnnnnnnnnnnnnnnnnnnnnnnnnnnnnnnnnnnnnnnnnnnnnnnnnnnnnnnnnnnnnnnnnnnnnnnnnnnnnnnnnnnnnnnnnnnnnnnnnnnnnnnnnnnnnnnnnnnnnnnnnnnnnnnnnnnnnnnnnnnnnnnnnnnnnnnnnnnnnnnnnnnnnnnnnnnnnnnnnnnnnnnnnnnnnnnnnnnnnnnnnnnnnnnnnnnnnnnnnnnnnnnnnnnnnnnnnnnnnnnnnnnnnnnnnnnnnnnnnnnnnnnnnnnnnnnnnnnnnnnnnnnnnnnnnnnnnnnnnnnnnnnnnnnnnnnnnnnnnnnnnnnnnnnnnnnnnnnnnnnnnnnnnnnnnnnnnnnnnnnnnnnnnnnnnnnnnnnnnnnnnnnnnnnnnnnnnnnnnnnnnnnnnnnnnnnnnnnnnnnnnnnnnnnnnnnnnnnnnnnnnnnnnnnnnnnnnnnnnnnnnnnnnnnnnnnnnnnnnnnnnnnnnnnnnnnnnnnnnnnnnnnnnnnnnnnnnnnnnnnnnnnnnnnnnnnnnnnnnnnnnnnnnnnnnnnnnnnnnnnnnnnnnnnnnnnnnnnnnnnnnnnnnnnnnnnnnnnnnnnnnnnnnnnnnnnnnnnnnnnnnnnnnnnnnnnnnnnnnnnnnnnnnnnnnnnnnnnnnnnnnnnnnnnnnnnnnnnnnnnnnnnnnnnnnnnnnnnnnnnnnnnnnnnnnnnnnnnnnnnnnnnnnnnnnnnnnnnnnnnnnnnnnnnnnnnnnnnnnnnnnnnnnnnnnnnnnnnnnnnnnnnnnnnnnnnnnnnnnnnnnnnnnnnnnnnnnnnnnnnnnnnnnnnnnnnnnnnnnnnnnnnnnnnnnnnnnnnnnnnnnnnnnnnnnnnnnnnnnnnnnnnnnnnnnnnnnnnnnnnnnnnnnnnnnnnnnnnnnnnnnnnnnnnnnnnnnnnnnnnnnnnnnnnnnnnnnnnnnnnnnnnnnnnnnnnnnnnnnnnnnnnnnnnnnnnnnnnnnnnnnnnnnnnnnnnnnnnnnnnnnnnnnnnnnnnnnnnnnnnnnnnnnnnnnnnnnnnnnnnnnnnnnnnnnnnnnnnnnnnnnnnnnnnnnnnnnnnnnnnnnnnnnnnnnnnnnnnnnnnnnnnnnnnnnnnnnnnnnnnnnnnnnnnnnnnnnnnnnnnnnnnnnnnnnnnnnnnnnnnnnnnnnnnnnnnnnnnnnnnnnnnnnnnnnnnnnnnnnnnnnnnnnnnnnnnnnnnnnnnnnnnnnnnnnnnnnnnnnnnnnnnnnnnnnnnnnnnnnnnnnnnnnnnnnnnnnnnnnnnnnnnnnnnnnnnnnnnnnnnnnnnnnnnnnnnnnnnnnnnnnnnnnnnnnnnnnnnnnnnnnnnnnnnnnnnnnnnnnnnnnnnnnnnnnnnnnnnnnnnnnnnnnnnnnnnnnnnnnnnnnnnnnnnnnnnnnnnnnnnnnnnnnnnnnnnnnnnnnnnnnnnnnnnnnnnnnnnnnnnnnnnnnnnnnnnnnnnnnnnnnnnnnnnnnnnnnnnnnnnnnnnnnnnnnnnnnnnnnnnnnnnnnnnnnnnnnnnnnnnnnnnnnnnnnnnnnnnnnnnnnnnnnnnnnnnnnnnnnnnnnnnnnnnnnnnnnnnnnnnnnnnnnnnnnnnnnnnnnnnnnnnnnnnnnnnnnnnnnnnnnnnnnnnnnnnnnnnnnnnnnnnnnnnnnnnnnnnnnnnnnnnnnnnnnnnnnnnnnnnnnnnnnnnnnnnnnnnnnnnnnnnnnnnnnnnnnnnnnnnnnnnnnnnnnnnnnnnnnnnnnnnnnnnnnnnnnnnnnnnnnnnnnnnnnnnnnnnnnnnnnnnnnnnnnnnnnnnnnnnnnnnnnnnnnnnnnnnnnnnnnnnnnnnnnnnnnnnnnnnnnnnnnnnnnnnnnnnnnnnnnnnnnnnnnnnnnnnnnnnnnnnnnnnnnnnnnnnnnnnnnnnnnnnnnnnnnnnnnnnnnnnnnnnnnnnnnnnnnnnnnnnnnnnnnnnnnnnnnnnnnnnnnnnnnnnnnnnnnnnnnnnnnnnnnnnnnnnnnnnnnnnnnnnnnnnnnnnnnnnnnnnnnnnnnnnnnnnnnnnnnnnnnnnnnnnnnnnnnnnnnnnnnnnnnnnnnnnnnnnnnnnnnnnnnnnnnnnnnnnnnnnnnnnnnnnnnnnnnnnnnnnnnnnnnnnnnnnnnnnnnnnnnnnnnnnnnnnnnnnnnnnnnnnnnnnnnnnnnnnnnnnnnnnnnnnnnnnnnnnnnnnnnnnnnnnnnnnnnnnnnnnnnnnnnnnnnnnnnnnnnnnnnnnnnnnnnnnnnnnnnnnnnnnnnnnnnnnnnnnnnnnnnnnnnnnnnnnnnnnnnnnnnnnnnnnnnnnnnnnnnnnnnnnnnnnnnnnnnnnnnnnnnnnnnnnnnnnnnnnnnnnnnnnnnnnnnnnnnnnnnnnnnnnnnnnnnnnnnnnnnnnnnnnnnnnnnnnnnnnnnnnnnnnnnnnnnnnnnnnnnnnnnnnnnnnnnnnnnnnnnnnnnnnnnnnnnnnnnnnnnnnnnnnnnnnnnnnnnnnnnnnnnnnnnnnnnnnnnnnnnnnnnnnnnnnnnnnnnnnnnnnnnnnnnnnnnnnnnnnnnnnnnnnnnnnnnnnnnnnnnnnnnnnnnnnnnnnnnnnnnnnnnnnnnnnnnnnnnnnnnnnnnnnnnnnnnnnnnnnnnnnnnnnnnnnnnnnnnnnnnnnnnnnnnnnnnnnnnnnnnnnnnnnnnnnnnnnnnnnnnnnnnnnnnnnnnnnnnnnnnnnnnnnnnnnnnnnnnnnnnnnnnnnnnnnnnnnnnnnnnnnnnnnnnnnnnnnnnnnnnnnnnnnnnnnnnnnnnnnnnnnnnnnnnnnnnnnnnnnnnnnnnnnnnnnnnnnnnnnnnnnnnnnnnnnnnnnnnnnnnnnnnnnnnnnnnnnnnnnnnnnnnnnnnnnnnnnnnnnnnnnnnnnnnnnnnnnnnnnnnnnnnnnnnnnnnnnnnnnnnnnnnnnnnnnnnnnnnnnnnnnnnnnnnnnnnnnnnnnnnnnnnnnnnnnnnnnnnnnnnnnnnnnnnnnnnnnnnnnnnnnnnnnnnnnnnnnnnnnnnnnnnnnnnnnnnnnnnnnnnnnnnnnnnnnnnnnnnnnnnnnnnnnnnnnnnnnnnnnnnnnnnnnnnnnnnnnnnnnnnnnnnnnnnnnnnnnnnnnnnnnnnnnnnnnnnnnnnnnnnnnnnnnnnnnnnnnnnnnnnnnnnnnnnnnnnnnnnnnnnnnnnnnnnnnnnnnnnnnnnnnnnnnnnnnnnnnnnnnnnnnnnnnnnnnnnnnnnnnnnnnnnnnnnnnnnnnnnnnnnnnnnnnnnnnnnnnnnnnnnnnnnnnnnnnnnnnnnnnnnnnnnnnnnnnnnnnnnnnnnnnnnnnnnnnnnnnnnnnnnnnnnnnnnnnnnnnnnnnnnnnnnnnnnnnnnnnnnnnnnnnnnnnnnnnnnnnnnnnnnnnnnnnnnnnnnnnnnnnnnnnnnnnnnnnnnnnnnnnnnnnnnnnnnnnnnnnnnnnnnnnnnnnnnnnnnnnnnnnnnnnnnnnnnnnnnnnnnnnnnnnnnnnnnnnnnnnnnnnnnnnnnnnnnnnnnnnnnnnnnnnnnnnnnnnnnnnnnnnnnnnnnnnnnnnnnnnnnnnnnnnnnnnnnnnnnnnnnnnnnnnnnnnnnnnnnnnnnnnnnnnnnnnnnnnnnnnnnnnnnnnnnnnnnnnnnnnnnnnnnnnnnnnnnnnnnnnnnnnnnnnnnnnnnnnnnnnnnnnnnnnnnnnnnnnnnnnnnnnnnnnnnnnnnnnnnnnnnnnnnnnnnnnnnnnnnnnnnnnnnnnnnnnnnnnnnnnnnnnnnnnnnnnnnnnnnnnnnnnnnnnnnnnnnnnnnnnnnnnnnnnnnnnnnnnnnnnnnnnnnnnnnnnnnnnnnnnnnnnnnnnnnnnnnnnnnnnnnnnnnnnnnnnnnnnnnnnnnnnnnnnnnnnnnnnnnnnnnnnnnnnnnnnnnnnnnnnnnnnnnnnnnnnnnnnnnnnnnnnnnnnnnnnnnnnnnnnnnnnnnnnnnnnnnnnnnnnnnnnnnnnnnnnnnnnnnnnnnnnnnnnnnnnnnnnnnnnnnnnnnnnnnnnnnnnnnnnnnnnnnnnnnnnnnnnnnnnnnnnnnnnnnnnnnnnnnnnnnnnnnnnnnnnnnnnnnnnnnnnnnnnnnnnnnnnnnnnnnnnnnnnnnnnnnnnnnnnnnnnnnnnnnnnnnnnnnnnnnnnnnnnnnnnnnnnnnnnnnnnnnnnnnnnnnnnnnnnnnnnnnnnnnnnnnnnnnnnnnnnnnnnnnnnnnnnnnnnnnnnnnnnnnnnnnnnnnnnnnnnnnnnnnnnnnnnnnnnnnnnnnnnnnnnnnnnnnnnnnnnnnnnnnnnnnnnnnnnnnnnnnnnnnnnnnnnnnnnnnnnnnnnnnnnnnnnnnnnnnnnnnnnnnnnnnnnnnnnnnnnnnnnnnnnnnnnnnnnnnnnnnnnnnnnnnnnnnnnnnnnnnnnnnnnnnnnnnnnnnnnnnnnnnnnnnnnnnnnnnnnnnnnnnnnnnnnnnnnnnnnnnnnnnnnnnnnnnnnnnnnnnnnnnnnnnnnnnnnnnnnnnnnnnnnnnnnnnnnnnnnnnnnnnnnnnnnnnnnnnnnnnnnnnnnnnnnnnnnnnnnnnnnnnnnnnnnnnnnnnnnnnnnnnnnnnnnnnnnnnnnnnnnnnnnnnnnnnnnnnnnnnnnnnnnnnnnnnnnnnnnnnnnnnnnnnnnnnnnnnnnnnnnnnnnnnnnnnnnnnnnnnnnnnnnnnnnnnnnnnnnnnnnnnnnnnnnnnnnnnnnnnnnnnnnnnnnnnnnnnnnnnnnnnnnnnnnnnnnnnnnnnnnnnnnnnnnnnnnnnnnnnnnnnnnnnnnnnnnnnnnnnnnnnnnnnnnnnnnnnnnnnnnnnnnnnnnnnnnnnnnnnnnnnnnnnnnnnnnnnnnnnnnnnnnnnnnnnnnnnnnnnnnnnnnnnnnnnnnnnnnnnnnnnnnnnnnnnnnnnnnnnnnnnnnnnnnnnnnnnnnnnnnnnnnnnnnnnnnnnnnnnnnnnnnnnnnnnnnnnnnnnnnnnnnnnnnnnnnnnnnnnnnnnnnnnnnnnnnnnnnnnnnnnnnnnnnnnnnnnnnnnnnnnnnnnnnnnnnnnnnnnnnnnnnnnnnnnnnnnnnnnnnnnnnnnnnnnnnnnnnnnnnnnnnnnnnnnnnnnnnnnnnnnnnnnnnnnnnnnnnnnnnnnnnnnnnnnnnnnnnnnnnnnnnnnnnnnnnnnnnnnnnnnnnnnnnnnnnnnnnnnnnnnnnnnnnnnnnnnnnnnnnnnnnnnnnnnnnnnnnnnnnnnnnnnnnnnnnnnnnnnnnnnnnnnnnnnnnnnnnnnnnnnnnnnnnnnnnnnnnnnnnnnnnnnnnnnnnnnnnnnnnnnnnnnnnnnnnnnnnnnnnnnnnnnnnnnnnnnnnnnnnnnnnnnnnnnnnnnnnnnnnnnnnnnnnnnnnnnnnnnnnnnnnnnnnnnnnnnnnnnnnnnnnnnnnnnnnnnnnnnnnnnnnnnnnnnnnnnnnnnnnnnnnnnnnnnnnnnnnnnnnnnnnnnnnnnnnnnnnnnnnnnnnnnnnnnnnnnnnnnnnnnnnnnnnnnnnnnnnnnnnnnnnnnnnnnnnnnnnnnnnnnnnnnnnnnnnnnnnnnnnnnnnnnnnnnnnnnnnnnnnnnnnnnnnnnnnnnnnnnnnnnnnnnnnnnnnnnnnnnnnnnnnnnnnnnnnnnnnnnnnnnnnnnnnnnnnnnnnnnnnnnnnnnnnnnnnnnnnnnnnnnnnnnnnnnnnnnnnnnnnnnnnnnnnnnnnnnnnnnnnnnnnnnnnnnnnnnnnnnnnnnnnnnnnnnnnnnnnnnnnnnnnnnnnnnnnnnnnnnnnnnnnnnnnnnnnnnnnnnnnnnnnnnnnnnnnnnnnnnnnnnnnnnnnnnnnnnnnnnnnnnnnnnnnnnnnnnnnnnnnnnnnnnnnnnnnnnnnnnnnnnnnnnnnnnnnnnnnnnnnnnnnnnnnnnnnnnnnnnnnnnnnnnnnnnnnnnnnnnnnnnnnnnnnnnnnnnnnnnnnnnnnnnnnnnnnnnnnnnnnnnnnnnnnnnnnnnnnnnnnnnnnnnnnnnnnnnnnnnnnnnnnnnnnnnnnnnnnnnnnnnnnnnnnnnnnnnnnnnnnnnnnnnnnnnnnnnnnnnnnnnnnnnnnnnnnnnnnnnnnnnnnnnnnnnnnnnnnnnnnnnnnnnnnnnnnnnnnnnnnnnnnnnnnnnnnnnnnnnnnnnnnnnnnnnnnnnnnnnnnnnnnnnnnnnnnnnnnnnnnnnnnnnnnnnnnnnnnnnnnnnnnnnnnnnnnnnnnnnnnnnnnnnnnnnnnnnnnnnnnnnnnnnnnnnnnnnnnnnnnnnnnnnnnnnnnnnnnnnnnnnnnnnnnnnnnnnnnnnnnnnnnnnnnnnnnnnnnnnnnnnnnnnnnnnnnnnnnnnnnnnnnnnnnnnnnnnnnnnnnnnnnnnnnnnnnnnnnnnnnnnnnnnnnnnnnnnnnnnnnnnnnnnnnnnnnnnnnnnnnnnnnnnnnnnnnnnnnnnnnnnnnnnnnnnnnnnnnnnnnnnnnnnnnnnnnnnnnnnnnnnnnnnnnnnnnnnnnnnnnnnnnnnnnnnnnnnnnnnnnnnnnnnnnnnnnnnnnnnnnnnnnnnnnnnnnnnnnnnnnnnnnnnnnnnnnnnnnnnnnnnnnnnnnnnnnnnnnnnnnnnnnnnnnnnnnnnnnnnnnnnnnnnnnnnnnnnnnnnnnnnnnnnnnnnnnnnnnnnnnnnnnnnnnnnnnnnnnnnnnnnnnnnnnnnnnnnnnnnnnnnnnnnnnnnnnnnnnnnnnnnnnnnnnnnnnnnnnnnnnnnnnnnnnnnnnnnnnnnnnnnnnnnnnnnnnnnnnnnnnnnnnnnnnnnnnnnnnnnnnnnnnnnnnnnnnnnnnnnnnnnnnnnnnnnnnnnnnnnnnnnnnnnnnnnnnnnnnnnnnnnnnnnnnnnnnnnnnnnnnnnnnnnnnnnnnnnnnnnnnnnnnnnnnnnnnnnnnnnnnnnnnnnnnnnnnnnnnnnnnnnnnnnnnnnnnnnnnnnnnnnnnnnnnnnnnnnnnnnnnnnnnnnnnnnnnnnnnnnnnnnnnnnnnnnnnnnnnnnnnnnnnnnnnnnnnnnnnnnnnnnnnnnnnnnnnnnnnnnnnnnnnnnnnnnnnnnnnnnnnnnnnnnnnnnnnnnnnnnnnnnnnnnnnnnnnnnnnnnnnnnnnnnnnnnnnnnnnnnnnnnnnnnnnnnnnnnnnnnnnnnnnnnnnnnnnnnnnnnnnnnnnnnnnnnnnnnnnnnnnnnnnnnnnnnnnnnnnnnnnnnnnnnnnnnnnnnnnnnnnnnnnnnnnnnnnnnnnnnnnnnnnnnnnnnnnnnnnnnnnnnnnnnnnnnnnnnnnnnnnnnnnnnnnnnnnnnnnnnnnnnnnnnnnnnnnnnnnnnnnnnnnnnnnnnnnnnnnnnnnnnnnnnnnnnnnnnnnnnnnnnnnnnnnnnnnnnnnnnnnnnnnnnnnnnnnnnnnnnnnnnnnnnnnnnnnnnnnnnnnnnnnnnnnnnnnnnnnnnnnnnnnnnnnnnnnnnnnnnnnnnnnnnnnnnnnnnnnnnnnnnnnnnnnnnnnnnnnnnnnnnnnnnnnnnnnnnnnnnnnnnnnnnnnnnnnnnnnnnnnnnnnnnnnnnnnnnnnnnnnnnnnnnnnnnnnnnnnnnnnnnnnnnnnnnnnnnnnnnnnnnnnnnnnnnnnnnnnnnnnnnnnnnnnnnnnnnnnnnnnnnnnnnnnnnnnnnnnnnnnnnnnnnnnnnnnnnnnnnnnnnnnnnnnnnnnnnnnnnnnnnnnnnnnnnnnnnnnnnnnnnnnnnnnnnnnnnnnnnnnnnnnnnnnnnnnnnnnnnnnnnnnnnnnnnnnnnnnnnnnnnnnnnnnnnnnnnnnnnnnnnnnnnnnnnnnnnnnnnnnnnnnnnnnnnnnnnnnnnnnnnnnnnnnnnnnnnnnnnnnnnnnnnnnnnnnnnnnnnnnnnnnnnnnnnnnnnnnnnnnnnnnnnnnnnnnnnnnnnnnnnnnnnnnnnnnnnnnnnnnnnnnnnnnnnnnnnnnnnnnnnnnnnnnnnnnnnnnnnnnnnnnnnnnnnnnnnnnnnnnnnnnnnnnnnnnnnnnnnnnnnnnnnnnnnnnnnnnnnnnnnnnnnnnnnnnnnnnnnnnnnnnnnnnnnnnnnnnnnnnnnnnnnnnnnnnnnnnnnnnnnnnnnnnnnnnnnnnnnnnnnnnnnnnnnnnnnnnnnnnnnnnnnnnnnnnnnnnnnnnnnnnnnnnnnnnnnnnnnnnnnnnnnnnnnnnnnnnnnnnnnnnnnnnnnnnnnnnnnnnnnnnnnnnnnnnnnnnnnnnnnnnnnnnnnnnnnnnnnnnnnnnnnnnnnnnnnnnnnnnnnnnnnnnnnnnnnnnnnnnnnnnnnnnnnnnnnnnnnnnnnnnnnnnnnnnnnnnnnnnnnnnnnnnnnnnnnnnnnnnnnnnnnnnnnnnnnnnnnnnnnnnnnnnnnnnnnnnnnnnnnnnnnnnnnnnnnnnnnnnnnnnnnnnnnnnnnnnnnnnnnnnnnnnnnnnnnnnnnnnnnnnnnnnnnnnnnnnnnnnnnnnnnnnnnnnnnnnnnnnnnnnnnnnnnnnnnnnnnnnnnnnnnnnnnnnnnnnnnnnnnnnnnnnnnnnnnnnnnnnnnnnnnnnnnnnnnnnnnnnnnnnnnnnnnnnnnnnnnnnnnnnnnnnnnnnnnnnnnnnnnnnnnnnnnnnnnnnnnnnnnnnnnnnnnnnnnnnnnnnnnnnnnnnnnnnnnnnnnnnnnnnnnnnnnnnnnnnnnnnnnnnnnnnnnnnnnnnnnnnnnnnnnnnnnnnnnnnnnnnnnnnnnnnnnnnnnnnnnnnnnnnnnnnnnnnnnnnnnnnnnnnnnnnnnnnnnnnnnnnnnnnnnnnnnnnnnnnnnnnnnnnnnnnnnnnnnnnnnnnnnnnnnnnnnnnnnnnnnnnnnnnnnnnnnnnnnnnnnnnnnnnnnnnnnnnnnnnnnnnnnnnnnnnnnnnnnnnnnnnnnnnnnnnnnnnnnnnnnnnnnnnnnnnnnnnnnnnnnnnnnnnnnnnnnnnnnnnnnnnnnnnnnnnnnnnnnnnnnnnnnnnnnnnnnnnnnnnnnnnnnnnnnnnnnnnnnnnnnnnnnnnnnnnnnnnnnnnnnnnnnnnnnnnnnnnnnnnnnnnnnnnnnnnnnnnnnnnnnnnnnnnnnnnnnnnnnnnnnnnnnnnnnnnnnnnnnnnnnnnnnnnnnnnnnnnnnnnnnnnnnnnnnnnnnnnnnnnnnnnnnnnnnnnnnnnnnnnnnnnnnnnnnnnnnnnnnnnnnnnnnnnnnnnnnnnnnnnnnnnnnnnnnnnnnnnnnnnnnnnnnnnnnnnnnnnnnnnnnnnnnnnnnnnnnnnnnnnnnnnnnnnnnnnnnnnnnnnnnnnnnnnnnnnnnnnnnnnnnnnnnnnnnnnnnnnnnnnnnnnnnnnnnnnnnnnnnnnnnnnnnnnnnnnnnnnnnnnnnnnnnnnnnnnnnnnnnnnnnnnnnnnnnnnnnnnnnnnnnnnnnnnnnnnnnnnnnnnnnnnnnnnnnnnnnnnnnnnnnnnnnnnnnnnnnnnnnnnnnnnnnnnnnnnnnnnnnnnnnnnnnnnnnnnnnnnnnnnnnnnnnnnnnnnnnnnnnnnnnnnnnnnnnnnnnnnnnnnnnnnnnnnnnnnnnnnnnnnnnnnnnnnnnnnnnnnnnnnnnnnnnnnnnnnnnnnnnnnnnnnnnnnnnnnnnnnnnnnnnnnnnnnnnnnnnnnnnnnnnnnnnnnnnnnnnnnnnnnnnnnnnnnnnnnnnnnnnnnnnnnnnnnnnnnnnnnnnnnnnnnnnnnnnnnnnnnnnnnnnnnnnnnnnnnnnnnnnnnnnnnnnnnnnnnnnnnnnnnnnnnnnnnnnnnnnnnnnnnnnnnnnnnnnnnnnnnnnnnnnnnnnnnnnnnnnnnnnnnnnnnnnnnnnnnnnnnnnnnnnnnnnnnnnnnnnnnnnnnnnnnnnnnnnnnnnnnnnnnnnnnnnnnnnnnnnnnnnnnnnnnnnnnnnnnnnnnnnnnnnnnnnnnnnnnnnnnnnnnnnnnnnnnnnnnnnnnnnnnnnnnnnnnnnnnnnnnnnnnnnnnnnnnnnnnnnnnnnnnnnnnnnnnnnnnnnnnnnnnnnnnnnnnnnnnnnnnnnnnnnnnnnnnnnnnnnnnnnnnnnnnnnnnnnnnnnnnnnnnnnnnnnnnnnnnnnnnnnnnnnnnnnnnnnnnnnnnnnnnnnnnnnnnnnnnnnnnnnnnnnnnnnnnnnnnnnnnnnnnnnnnnnnnnnnnnnnnnnnnnnnnnnnnnnnnnnnnnnnnnnnnnnnnnnnnnnnnnnnnnnnnnnnnnnnnnnnnnnnnnnnnnnnnnnnnnnnnnnnnnnnnnnnnnnnnnnnnnnnnnnnnnnnnnnnnnnnnnnnnnnnnnnnnnnnnnnnnnnnnnnnnnnnnnnnnnnnnnnnnnnnnnnnnnnnnnnnnnnnnnnnnnnnnnnnnnnnnnnnnnnnnnnnnnnnnnnnnnnnnnnnnnnnnnnnnnnnnnnnnnnnnnnnnnnnnnnnnnnnnnnnnnnnnnnnnnnnnnnnnnnnnnnnnnnnnnnnnnnnnnnnnnnnnnnnnnnnnnnnnnnnnnnnnnnnnnnnnnnnnnnnnnnnnnnnnnnnnnnnnnnnnnnnnnnnnnnnnnnnnnnnnnnnnnnnnnnnnnnnnnnnnnnnnnnnnnnnnnnnnnnnnnnnnnnnnnnnnnnnnnnnnnnnnnnnnnnnnnnnnnnnnnnnnnnnnnnnnnnnnnnnnnnnnnnnnnnnnnnnnnnnnnnnnnnnnnnnnnnnnnnnnnnnnnnnnnnnnnnnnnnnnnnnnnnnnnnnnnnnnnnnnnnnnnnnnnnnnnnnnnnnnnnnnnnnnnnnnnnnnnnnnnnnnnnnnnnnnnnnnnnnnnnnnnnnnnnnnnnnnnnnnnnnnnnnnnnnnnnnnnnnnnnnnnnnnnnnnnnnnnnnnnnnnnnnnnnnnnnnnnnnnnnnnnnnnnnnnnnnnnnnnnnnnnnnnnnnnnnnnnnnnnnnnnnnnnnnnnnnnnnnnnnnnnnnnnnnnnnnnnnnnnnnnnnnnnnnnnnnnnnnnnnnnnnnnnnnnnnnnnnnnnnnnnnnnnnnnnnnnnnnnnnnnnnnnnnnnnnnnnnnnnnnnnnnnnnnnnnnnnnnnnnnnnnnnnnnnnnnnnnnnnnnnnnnnnnnnnnnnnnnnnnnnnnnnnnnnnnnnnnnnnnnnnnnnnnnnnnnnnnnnnnnnnnnnnnnnnnnnnnnnnnnnnnnnnnnnnnnnnnnnnnnnnnnnnnnnnnnnnnnnnnnnnnnnnnnnnnnnnnnnnnnnnnnnnnnnnnnnnnnnnnnnnnnnnnnnnnnnnnnnnnnnnnnnnnnnnnnnnnnnnnnnnnnnnnnnnnnnnnnnnnnnnnnnnnnnnnnnnnnnnnnnnnnnnnnnnnnnnnnnnnnnnnnnnnnnnnnnnnnnnnnnnnnnnnnnnnnnnnnnnnnnnnnnnnnnnnnnnnnnnnnnnnnnnnnnnnnnnnnnnnnnnnnnnnnnnnnnnnnnnnnnnnnnnnnnnnnnnnnnnnnnnnnnnnnnnnnnnnnnnnnnnnnnnnnnnnnnnnnnnnnnnnnnnnnnnnnnnnnnnnnnnnnnnnnnnnnnnnnnnnnnnnnnnnnnnnnnnnnnnnnnnnnnnnnnnnnnnnnnnnnnnnnnnnnnnnnnnnnnnnnnnnnnnnnnnnnnnnnnnnnnnnnnnnnnnnnnnnnnnnnnnnnnnnnnnnnnnnnnnnnnnnnnnnnnnnnnnnnnnnnnnnnnnnnnnnnnnnnnnnnnnnnnnnnnnnnnnnnnnnnnnnnnnnnnnnnnnnnnnnnnnnnnnnnnnnnnnnnnnnnnnnnnnnnnnnnnnnnnnnnnnnnnnnnnnnnnnnnnnnnnnnnnnnnnnnnnnnnnnnnnnnnnnnnnnnnnnnnnnnnnnnnnnnnnnnnnnnnnnnnnnnnnnnnnnnnnnnnnnnnnnnnnnnnnnnnnnnnnnnnnnnnnnnnnnnnnnnnnnnnnnnnnnnnnnnnnnnnnnnnnnnnnnnnnnnnnnnnnnnnnnnnnnnnnnnnnnnnnnnnnnnnnnnnnnnnnnnnnnnnnnnnnnnnnnnnnnnnnnnnnnnnnnnnnnnnnnnnnnnnnnnnnnnnnnnnnnnnnnnnnnnnnnnnnnnnnnnnnnnnnnnnnnnnnnnnnnnnnnnnnnnnnnnnnnnnnnnnnnnnnnnnnnnnnnnnnnnnnnnnnnnnnnnnnnnnnnnnnnnnnnnnnnnnnnnnnnnnnnnnnnnnnnnnnnnnnnnnnnnnnnnnnnnnnnnnnnnnnnnnnnnnnnnnnnnnnnnnnnnnnnnnnnnnnnnnnnnnnnnnnnnnnnnnnnnnnnnnnnnnnnnnnnnnnnnnnnnnnnnnnnnnnnnnnnnnnnnnnnnnnnnnnnnnnnnnnnnnnnnnnnnnnnnnnnnnnnnnnnnnnnnnnnnnnnnnnnnnnnnnnnnnnnnnnnnnnnnnnnnnnnnnnnnnnnnnnnnnnnnnnnnnnnnnnnnnnnnnnnnnnnnnnnnnnnnnnnnnnnnnnnnnnnnnnnnnnnnnnnnnnnnnnnnnnnnnnnnnnnnnnnnnnnnnnnnnnnnnnnnnnnnnnnnnnnnnnnnnnnnnnnnnnnnnnnnnnnnnnnnnnnnnnnnnnnnnnnnnnnnnnnnnnnnnnnnnnnnnnnnnnnnnnnnnnnnnnnnnnnnnnnnnnnnnnnnnnnnnnnnnnnnnnnnnnnnnnnnnnnnnnnnnnnnnnnnnnnnnnnnnnnnnnnnnnnnnnnnnnnnnnnnnnnnnnnnnnnnnnnnnnnnnnnnnnnnnnnnnnnnnnnnnnnnnnnnnnnnnnnnnnnnnnnnnnnnnnnnnnnnnnnnnnnnnnnnnnnnnnnnnnnnnnnnnnnnnnnnnnnnnnnnnnnnnnnnnnnnnnnnnnnnnnnnnnnnnnnnnnnnnnnnnnnnnnnnnnnnnnnnnnnnnnnnnnnnnnnnnnnnnnnnnnnnnnnnnnnnnnnnnnnnnnnnnnnnnnnnnnnnnnnnnnnnnnnnnnnnnnnnnnnnnnnnnnnnnnnnnnnnnnnnnnnnnnnnnnnnnnnnnnnnnnnnnnnnnnnnnnnnnnnnnnnnnnnnnnnnnnnnnnnnnnnnnnnnnnnnnnnnnnnnnnnnnnnnnnnnnnnnnnnnnnnnnnnnnnnnnnnnnnnnnnnnnnnnnnnnnnnnnnnnnnnnnnnnnnnnnnnnnnnnnnnnnnnnnnnnnnnnnnnnnnnnnnnnnnnnnnnnnnnnnnnnnnnnnnnnnnnnnnnnnnnnnnnnnnnnnnnnnnnnnnnnnnnnnnnnnnnnnnnnnnnnnnnnnnnnnnnnnnnnnnnnnnnnnnnnnnnnnnnnnnnnnnnnnnnnnnnnnnnnnnnnnnnnnnnnnnnnnnnnnnnnnnnnnnnnnnnnnnnnnnnnnnnnnnnnnnnnnnnnnnnnnnnnnnnnnnnnnnnnnnnnnnnnnnnnnnnnnnnnnnnnnnnnnnnnnnnnnnnnnnnnnnnnnnnnnnnnnnnnnnnnnnnnnnnnnnnnnnnnnnnnnnnnnnnnnnnnnnnnnnnnnnnnnnnnnnnnnnnnnnnnnnnnnnnnnnnnnnnnnnnnnnnnnnnnnnnnnnnnnnnnnnnnnnnnnnnnnnnnnnnnnnnnnnnnnnnnnnnnnnnnnnnnnnnnnnnnnnnnnnnnnnnnnnnnnnnnnnnnnnnnnnnnnnnnnnnnnnnnnnnnnnnnnnnnnnnnnnnnnnnnnnnnnnnnnnnnnnnnnnnnnnnnnnnnnnnnnnnnnnnnnnnnnnnnnnnnnnnnnnnnnnnnnnnnnnnnnnnnnnnnnnnnnnnnnnnnnnnnnnnnnnnnnnnnnnnnnnnnnnnnnnnnnnnnnnnnnnnnnnnnnnnnnnnnnnnnnnnnnnnnnnnnnnnnnnnnnnnnnnnnnnnnnnnnnnnnnnnnnnnnnnnnnnnnnnnnnnnnnnnnnnnnnnnnnnnnnnnnnnnnnnnnnnnnnnnnnnnnnnnnnnnnnnnnnnnnnnnnnnnnnnnnnnnnnnnnnnnnnnnnnnnnnnnnnnnnnnnnnnnnnnnnnnnnnnnnnnnnnnnnnnnnnnnnnnnnnnnnnnnnnnnnnnnnnnnnnnnnnnnnnnnnnnnnnnnnnnnnnnnnnnnnnnnnnnnnnnnnnnnnnnnnnnnnnnnnnnnnnnnnnnnnnnnnnnnnnnnnnnnnnnnnnnnnnnnnnnnnnnnnnnnnnnnnnnnnnnnnnnnnnnnnnnnnnnnnnnnnnnnnnnnnnnnnnnnnnnnnnnnnnnnnnnnnnnnnnnnnnnnnnnnnnnnnnnnnnnnnnnnnnnnnnnnnnnnnnnnnnnnnnnnnnnnnnnnnnnnnnnnnnnnnnnnnnnnnnnnnnnnnnnnnnnnnnnnnnnnnnnnnnnnnnnnnnnnnnnnnnnnnnnnnnnnnnnnnnnnnnnnnnnnnnnnnnnnnnnnnnnnnnnnnnnnnnnnnnnnnnnnnnnnnnnnnnnnnnnnnnnnnnnnnnnnnnnnnnnnnnnnnnnnnnnnnnnnnnnnnnnnnnnnnnnnnnnnnnnnnnnnnnnnnnnnnnnnnnnnnnnnnnnnnnnnnnnnnnnnnnnnnnnnnnnnnnnnnnnnnnnnnnnnnnnnnnnnnnnnnnnnnnnnnnnnnnnnnnnnnnnnnnnnnnnnnnnnnnnnnnnnnnnnnnnnnnnnnnnnnnnnnnnnnnnnnnnnnnnnnnnnnnnnnnnnnnnnnnnnnnnnnnnnnnnnnnnnnnnnnnnnnnnnnnnnnnnnnnnnnnnnnnnnnnnnnnnnnnnnnnnnnnnnnnnnnnnnnnnnnnnnnnnnnnnnnnnnnnnnnnnnnnnnnnnnnnnnnnnnnnnnnnnnnnnnnnnnnnnnnnnnnnnnnnnnnnnnnnnnnnnnnnnnnnnnnnnnnnnnnnnnnnnnnnnnnnnnnnnnnnnnnnnnnnnnnnnnnnnnnnnnnnnnnnnnnnnnnnnnnnnnnnnnnnnnnnnnnnnnnnnnnnnnnnnnnnnnnnnnnnnnnnnnnnnnnnnnnnnnnnnnnnnnnnnnnnnnnnnnnnnnnnnnnnnnnnnnnnnnnnnnnnnnnnnnnnnnnnnnnnnnnnnnnnnnnnnnnnnnnnnnnnnnnnnnnnnnnnnnnnnnnnnnnnnnnnnnnnnnnnnnnnnnnnnnnnnnnnnnnnnnnnnnnnnnnnnnnnnnnnnnnnnnnnnnnnnnnnnnnnnnnnnnnnnnnnnnnnnnnnnnnnnnnnnnnnnnnnnnnnnnnnnnnnnnnnnnnnnnnnnnnnnnnnnnnnnnnnnnnnnnnnnnnnnnnnnnnnnnnnnnnnnnnnnnnnnnnnnnnnnnnnnnnnnnnnnnnnnnnnnnnnnnnnnnnnnnnnnnnnnnnnnnnnnnnnnnnnnnnnnnnnnnnnnnnnnnnnnnnnnnnnnnnnnnnnnnnnnnnnnnnnnnnnnnnnnnnnnnnnnnnnnnnnnnnnnnnnnnnnnnnnnnnnnnnnnnnnnnnnnnnnnnnnnnnnnnnnnnnnnnnnnnnnnnnnnnnnnnnnnnnnnnnnnnnnnnnnnnnnnnnnnnnnnnnnnnnnnnnnnnnnnnnnnnnnnnnnnnnnnnnnnnnnnnnnnnnnnnnnnnnnnnnnnnnnnnnnnnnnnnnnnnnnnnnnnnnnnnnnnnnnnnnnnnnnnnnnnnnnnnnnnnnnnnnnnnnnnnnnnnnnnnnnnnnnnnnnnnnnnnnnnnnnnnnnnnnnnnnnnnnnnnnnnnnnnnnnnnnnnnnnnnnnnnnnnnnnnnnnnnnnnnnnnnnnnnnnnnnnnnnnnnnnnnnnnnnnnnnnnnnnnnnnnnnnnnnnnnnnnnnnnnnnnnnnnnnnnnnnnnnnnnnnnnnnnnnnnnnnnnnnnnnnnnnnnnnnnnnnnnnnnnnnnnnnnnnnnnnnnnnnnnnnnnnnnnnnnnnnnnnnnnnnnnnnnnnnnnnnnnnnnnnnnnnnnnnnnnnnnnnnnnnnnnnnnnnnnnnnnnnnnnnnnnnnnnnnnnnnnnnnnnnnnnnnnnnnnnnnnnnnnnnnnnnnnnnnnnnnnnnnnnnnnnnnnnnnnnnnnnnnnnnnnnnnnnnnnnnnnnnnnnnnnnnnnnnnnnnnnnnnnnnnnnnnnnnnnnnnnnnnnnnnnnnnnnnnnnnnnnnnnnnnnnnnnnnnnnnnnnnnnnnnnnnnnnnnnnnnnnnnnnnnnnnnnnnnnnnnnnnnnnnnnnnnnnnnnnnnnnnnnnnnnnnnnnnnnnnnnnnnnnnnnnnnnnnnnnnnnnnnnnnnnnnnnnnnnnnnnnnnnnnnnnnnnnnnnnnnnnnnnnnnnnnnnnnnnnnnnnnnnnnnnnnnnnnnnnnnnnnnnnnnnnnnnnnnnnnnnnnnnnnnnnnnnnnnnnnnnnnnnnnnnnnnnnnnnnnnnnnnnnnnnnnnnnnnnnnnnnnnnnnnnnnnnnnnnnnnnnnnnnnnnnnnnnnnnnnnnnnnnnnnnnnnnnnnnnnnnnnnnnnnnnnnnnnnnnnnnnnnnnnnnnnnnnnnnnnnnnnnnnnnnnnnnnnnnnnnnnnnnnnnnnnnnnnnnnnnnnnnnnnnnnnnnnnnnnnnnnnnnnnnnnnnnnnnnnnnnnnnnnnnnnnnnnnnnnnnnnnnnnnnnnnnnnnnnnnnnnnnnnnnnnnnnnnnnnnnnnnnnnnnnnnnnnnnnnnnnnnnnnnnnnnnnnnnnnnnnnnnnnnnnnnnnnnnnnnnnnnnnnnnnnnnnnnnnnnnnnnnnnnnnnnnnnnnnnnnnnnnnnnnnnnnnnnnnnnnnnnnnnnnnnnnnnnnnnnnnnnnnnnnnnnnnnnnnnnnnnnnnnnnnnnnnnnnnnnnnnnnnnnnnnnnnnnnnnnnnnnnnnnnnnnnnnnnnnnnnnnnnnnnnnnnnnnnnnnnnnnnnnnnnnnnnnnnnnnnnnnnnnnnnnnnnnnnnnnnnnnnnnnnnnnnnnnnnnnnnnnnnnnnnnnnnnnnnnnnnnnnnnnnnnnnnnnnnnnnnnnnnnnnnnnnnnnnnnnnnnnnnnnnnnnnnnnnnnnnnnnnnnnnnnnnnnnnnnnnnnnnnnnnnnnnnnnnnnnnnnnnnnnnnnnnnnnnnnnnnnnnnnnnnnnnnnnnnnnnnnnnnnnnnnnnnnnnnnnnnnnnnnnnnnnnnnnnnnnnnnnnnnnnnnnnnnnnnnnnnnnnnnnnnnnnnnnnnnnnnnnnnnnnnnnnnnnnnnnnnnnnnnnnnnnnnnnnnnnnnnnnnnnnnnnnnnnnnnnnnnnnnnnnnnnnnnnnnnnnnnnnnnnnnnnnnnnnnnnnnnnnnnnnnnnnnnnnnnnnnnnnnnnnnnnnnnnnnnnnnnnnnnnnnnnnnnnnnnnnnnnnnnnnnnnnnnnnnnnnnnnnnnnnnnnnnnnnnnnnnnnnnnnnnnnnnnnnnnnnnnnnnnnnnnnnnnnnnnnnnnnnnnnnnnnnnnnnnnnnnnnnnnnnnnnnnnnnnnnnnnnnnnnnnnnnnnnnnnnnnnnnnnnnnnnnnnnnnnnnnnnnnnnnnnnnnnnnnnnnnnnnnnnnnnnnnnnnnnnnnnnnnnnnnnnnnnnnnnnnnnnnnnnnnnnnnnnnnnnnnnnnnnnnnnnnnnnnnnnnnnnnnnnnnnnnnnnnnnnnnnnnnnnnnnnnnnnnnnnnnnnnnnnnnnnnnnnnnnnnnnnnnnnnnnnnnnnnnnnnnnnnnnnnnnnnnnnnnnnnnnnnnnnnnnnnnnnnnnnnnnnnnnnnnnnnnnnnnnnnnnnnnnnnnnnnnnnnnnnnnnnnnnnnnnnnnnnnnnnnnnnnnnnnnnnnnnnnnnnnnnnnnnnnnnnnnnnnnnnnnnnnnnnnnnnnnnnnnnnnnnnnnnnnnnnnnnnnnnnnnnnnnnnnnnnnnnnnnnnnnnnnnnnnnnnnnnnnnnnnnnnnnnnnnnnnnnnnnnnnnnnnnnnnnnnnnnnnnnnnnnnnnnnnnnnnnnnnnnnnnnnnnnnnnnnnnnnnnnnnnnnnnnnnnnnnnnnnnnnnnnnnnnnnnnnnnnnnnnnnnnnnnnnnnnnnnnnnnnnnnnnnnnnnnnnnnnnnnnnnnnnnnnnnnnnnnnnnnnnnnnnnnnnnnnnnnnnnnnnnnnnnnnnnnnnnnnnnnnnnnnnnnnnnnnnnnnnnnnnnnnnnnnnnnnnnnnnnnnnnnnnnnnnnnnnnnnnnnnnnnnnnnnnnnnnnnnnnnnnnnnnnnnnnnnnnnnnnnnnnnnnnnnnnnnnnnnnnnnnnnnnnnnnnnnnnnnnnnnnnnnnnnnnnnnnnnnnnnnnnnnnnnnnnnnnnnnnnnnnnnnnnnnnnnnnnnnnnnnnnnnnnnnnnnnnnnnnnnnnnnnnnnnnnnnnnnnnnnnnnnnnnnnnnnnnnnnnnnnnnnnnnnnnnnnnnnnnnnnnnnnnnnnnnnnnnnnnnnnnnnnnnnnnnnnnnnnnnnnnnnnnnnnnnnnnnnnnnnnnnnnnnnnnnnnnnnnnnnnnnnnnnnnnnnnnnnnnnnnnnnnnnnnnnnnnnnnnnnnnnnnnnnnnnnnnnnnnnnnnnnnnnnnnnnnnnnnnnnnnnnnnnnnnnnnnnnnnnnnnnnnnnnnnnnnnnnnnnnnnnnnnnnnnnnnnnnnnnnnnnnnnnnnnnnnnnnnnnnnnnnnnnnnnnnnnnnnnnnnnnnnnnnnnnnnnnnnnnnnnnnnnnnnnnnnnnnnnnnnnnnnnnnnnnnnnnnnnnnnnnnnnnnnnnnnnnnnnnnnnnnnnnnnnnnnnnnnnnnnnnnnnnnnnnnnnnnnnnnnnnnnnnnnnnnnnnnnnnnnnnnnnnnnnnnnnnnnnnnnnnnnnnnnnnnnnnnnnnnnnnnnnnnnnnnnnnnnnnnnnnnnnnnnnnnnnnnnnnnnnnnnnnnnnnnnnnnnnnnnnnnnnnnnnnnnnnnnnnnnnnnnnnnnnnnnnnnnnnnnnnnnnnnnnnnnnnnnnnnnnnnnnnnnnnnnnnnnnnnnnnnnnnnnnnnnnnnnnnnnnnnnnnnnnnnnnnnnnnnnnnnnnnnnnnnnnnnnnnnnnnnnnnnnnnnnnnnnnnnnnnnnnnnnnnnnnnnnnnnnnnnnnnnnnnnnnnnnnnnnnnnnnnnnnnnnnnnnnnnnnnnnnnnnnnnnnnnnnnnnnnnnnnnnnnnnnnnnnnnnnnnnnnnnnnnnnnnnnnnnnnnnnnnnnnnnnnnnnnnnnnnnnnnnnnnnnnnnnnnnnnnnnnnnnnnnnnnnnnnnnnnnnnnnnnnnnnnnnnnnnnnnnnnnnnnnnnnnnnnnnnnnnnnnnnnnnnnnnnnnnnnnnnnnnnnnnnnnnnnnnnnnnnnnnnnnnnnnnnnnnnnnnnnnnnnnnnnnnnnnnnnnnnnnnnnnnnnnnnnnnnnnnnnnnnnnnnnnnnnnnnnnnnnnnnnnnnnnnnnnnnnnnnnnnnnnnnnnnnnnnnnnnnnnnnnnnnnnnnnnnnnnnnnnnnnnnnnnnnnnnnnnnnnnnnnnnnnnnnnnnnnnnnnnnnnnnnnnnnnnnnnnnnnnnnnnnnnnnnnnnnnnnnnnnnnnnnnnnnnnnnnnnnnnnnnnnnnnnnnnnnnnnnnnnnnnnnnnnnnnnnnnnnnnnnnnnnnnnnnnnnnnnnnnnnnnnnnnnnnnnnnnnnnnnnnnnnnnnnnnnnnnnnnnnnnnnnnnnnnnnnnnnnnnnnnnnnnnnnnnnnnnnnnnnnnnnnnnnnnnnnnnnnnnnnnnnnnnnnnnnnnnnnnnnnnnnnnnnnnnnnnnnnnnnnnnnnnnnnnnnnnnnnnnnnnnnnnnnnnnnnnnnnnnnnnnnnnnnnnnnnnnnnnnnnnnnnnnnnnnnnnnnnnnnnnnnnnnnnnnnnnnnnnnnnnnnnnnnnnnnnnnnnnnnnnnnnnnnnnnnnnnnnnnnnnnnnnnnnnnnnnnnnnnnnnnnnnnnnnnnnnnnnnnnnnnnnnnnnnnnnnnnnnnnnnnnnnnnnnnnnnnnnnnnnnnnnnnnnnnnnnnnnnnnnnnnnnnnnnnnnnnnnnnnnnnnnnnnnnnnnnnnnnnnnnnnnnnnnnnnnnnnnnnnnnnnnnnnnnnnnnnnnnnnnnnnnnnnnnnnnnnnnnnnnnnnnnnnnnnnnnnnnnnnnnnnnnnnnnnnnnnnnnnnnnnnnnnnnnnnnnnnnnnnnnnnnnnnnnnnnnnnnnnnnnnnnnnnnnnnnnnnnnnnnnnnnnnnnnnnnnnnnnnnnnnnnnnnnnnnnnnnnnnnnnnnnnnnnnnnnnnnnnnnnnnnnnnnnnnnnnnnnnnnnnnnnnnnnnnnnnnnnnnnnnnnnnnnnnnnnnnnnnnnnnnnnnnnnnnnnnnnnnnnnnnnnnnnnnnnnnnnnnnnnnnnnnnnnnnnnnnnnnnnnnnnnnnnnnnnnnnnnnnnnnnnnnnnnnnnnnnnnnnnnnnnnnnnnnnnnnnnnnnnnnnnnnnnnnnnnnnnnnnnnnnnnnnnnnnnnnnnnnnnnnnnnnnnnnnnnnnnnnnnnnnnnnnnnnnnnnnnnnnnnnnnnnnnnnnnnnnnnnnnnnnnnnnnnnnnnnnnnnnnnnnnnnnnnnnnnnnnnnnnnnnnnnnnnnnnnnnnnnnnnnnnnnnnnnnnnnnnnnnnnnnnnnnnnnnnnnnnnnnnnnnnnnnnnnnnnnnnnnnnnnnnnnnnnnnnnnnnnnnnnnnnnnnnnnnnnnnnnnnnnnnnnnnnnnnnnnnnnnnnnnnnnnnnnnnnnnnnnnnnnnnnnnnnnnnnnnnnnnnnnnnnnnnnnnnnnnnnnnnnnnnnnnnnnnnnnnnnnnnnnnnnnnnnnnnnnnnnnnnnnnnnnnnnnnnnnnnnnnnnnnnnnnnnnnnnnnnnnnnnnnnnnnnnnnnnnnnnnnnnnnnnnnnnnnnnnnnnnnnnnnnnnnnnnnnnnnnnnnnnnnnnnnnnnnnnnnnnnnnnnnnnnnnnnnnnnnnnnnnnnnnnnnnnnnnnnnnnnnnnnnnnnnnnnnnnnnnnnnnnnnnnnnnnnnnnnnnnnnnnnnnnnnnnnnnnnnnnnnnnnnnnnnnnnnnnnnnnnnnnnnnnnnnnnnnnnnnnnnnnnnnnnnnnnnnnnnnnnnnnnnnnnnnnnnnnnnnnnnnnnnnnnnnnnnnnnnnnnnnnnnnnnnnnnnnnnnnnnnnnnnnnnnnnnnnnnnnnnnnnnnnnnnnnnnnnnnnnnnnnnnnnnnnnnnnnnnnnnnnnnnnnnnnnnnnnnnnnnnnnnnnnnnnnnnnnnnnnnnnnnnnnnnnnnnnnnnnnnnnnnnnnnnnnnnnnnnnnnnnnnnnnnnnnnnnnnnnnnnnnnnnnnnnnnnnnnnnnnnnnnnnnnnnnnnnnnnnnnnnnnnnnnnnnnnnnnnnnnnnnnnnnnnnnnnnnnnnnnnnnnnnnnnnnnnnnnnnnnnnnnnnnnnnnnnnnnnnnnnnnnnnnnnnnnnnnnnnnnnnnnnnnnnnnnnnnnnnnnnnnnnnnnnnnnnnnnnnnnnnnnnnnnnnnnnnnnnnnnnnnnnnnnnnnnnnnnnnnnnnnnnnnnnnnnnnnnnnnnnnnnnnnnnnnnnnnnnnnnnnnnnnnnnnnnnnnnnnnnnnnnnnnnnnnnnnnnnnnnnnnnnnnnnnnnnnnnnnnnnnnnnnnnnnnnnnnnnnnnnnnnnnnnnnnnnnnnnnnnnnnnnnnnnnnnnnnnnnnnnnnnnnnnnnnnnnnnnnnnnnnnnnnnnnnnnnnnnnnnnnnnnnnnnnnnnnnnnnnnnnnnnnnnnnnnnnnnnnnnnnnnnnnnnnnnnnnnnnnnnnnnnnnnnnnnnnnnnnnnnnnnnnnnnnnnnnnnnnnnnnnnnnnnnnnnnnnnnnnnnnnnnnnnnnnnnnnnnnnnnnnnnnnnnnnnnnnnnnnnnnnnnnnnnnnnnnnnnnnnnnnnnnnnnnnnnnnnnnnnnnnnnnnnnnnnnnnnnnnnnnnnnnnnnnnnnnnnnnnnnnnnnnnnnnnnnnnnnnnnnnnnnnnnnnnnnnnnnnnnnnnnnnnnnnnnnnnnnnnnnnnnnnnnnnnnnnnnnnnnnnnnnnnnnnnnnnnnnnnnnnnnnnnnnnnnnnnnnnnnnnnnnnnnnnnnnnnnnnnnnnnnnnnnnnnnnnnnnnnnnnnnnnnnnnnnnnnnnnnnnnnnnnnnnnnnnnnnnnnnnnnnnnnnnnnnnnnnnnnnnnnnnnnnnnnnnnnnnnnnnnnnnnnnnnnnnnnnnnnnnnnnnnnnnnnnnnnnnnnnnnnnnnnnnnnnnnnnnnnnnnnnnnnnnnnnnnnnnnnnnnnnnnnnnnnnnnnnnnnnnnnnnnnnnnnnnnnnnnnnnnnnnnnnnnnnnnnnnnnnnnnnnnnnnnnnnnnnnnnnnnnnnnnnnnnnnnnnnnnnnnnnnnnnnnnnnnnnnnnnnnnnnnnnnnnnnnnnnnnnnnnnnnnnnnnnnnnnnnnnnnnnnnnnnnnnnnnnnnnnnnnnnnnnnnnnnnnnnnnnnnnnnnnnnnnnnnnnnnnnnnnnnnnnnnnnnnnnnnnnnnnnnnnnnnnnnnnnnnnnnnnnnnnnnnnnnnnnnnnnnnnnnnnnnnnnnnnnnnnnnnnnnnnnnnnnnnnnnnnnnnnnnnnnnnnnnnnnnnnnnnnnnnnnnnnnnnnnnnnnnnnnnnnnnnnnnnnnnnnnnnnnnnnnnnnnnnnnnnnnnnnnnnnnnnnnnnnnnnnnnnnnnnnnnnnnnnnnnnnnnnnnnnnnnnnnnnnnnnnnnnnnnnnnnnnnnnnnnnnnnnnnnnnnnnnnnnnnnnnnnnnnnnnnnnnnnnnnnnnnnnnnnnnnnnnnnnnnnnnnnnnnnnnnnnnnnnnnnnnnnnnnnnnnnnnnnnnnnnnnnnnnnnnnnnnnnnnnnnnnnnnnnnnnnnnnnnnnnnnnnnnnnnnnnnnnnnnnnnnnnnnnnnnnnnnnnnnnnnnnnnnnnnnnnnnnnnnnnnnnnnnnnnnnnnnnnnnnnnnnnnnnnnnnnnnnnnnnnnnnnnnnnnnnnnnnnnnnnnnnnnnnnnnnnnnnnnnnnnnnnnnnnnnnnnnnnnnnnnnnnnnnnnnnnnnnnnnnnnnnnnnnnnnnnnnnnnnnnnnnnnnnnnnnnnnnnnnnnnnnnnnnnnnnnnnnnnnnnnnnnnnnnnnnnnnnnnnnnnnnnnnnnnnnnnnnnnnnnnnnnnnnnnnnnnnnnnnnnnnnnnnnnnnnnnnnnnnnnnnnnnnnnnnnnnnnnnnnnnnnnnnnnnnnnnnnnnnnnnnnnnnnnnnnnnnnnnnnnnnnnnnnnnnnnnnnnnnnnnnnnnnnnnnnnnnnnnnnnnnnnnnnnnnnnnnnnnnnnnnnnnnnnnnnnnnnnnnnnnnnnnnnnnnnnnnnnnnnnnnnnnnnnnnnnnnnnnnnnnnnnnnnnnnnnnnnnnnnnnnnnnnnnnnnnnnnnnnnnnnnnnnnnnnnnnnnnnnnnnnnnnnnnnnnnnnnnnnnnnnnnnnnnnnnnnnnnnnnnnnnnnnnnnnnnnnnnnnnnnnnnnnnnnnnnnnnnnnnnnnnnnnnnnnnnnnnnnnnnnnnnnnnnnnnnnnnnnnnnnnnnnnnnnnnnnnnnnnnnnnnnnnnnnnnnnnnnnnnnnnnnnnnnnnnnnnnnnnnnnnnnnnnnnnnnnnnnnnnnnnnnnnnnnnnnnnnnnnnnnnnnnnnnnnnnnnnnnnnnnnnnnnnnnnnnnnnnnnnnnnnnnnnnnnnnnnnnnnnnnnnnnnnnnnnnnnnnnnnnnnnnnnnnnnnnnnnnnnnnnnnnnnnnnnnnnnnnnnnnnnnnnnnnnnnnnnnnnnnnnnnnnnnnnnnnnnnnnnnnnnnnnnnnnnnnnnnnnnnnnnnnnnnnnnnnnnnnnnnnnnnnnnnnnnnnnnnnnnnnnnnnnnnnnnnnnnnnnnnnnnnnnnnnnnnnnnnnnnnnnnnnnnnnnnnnnnnnnnnnnnnnnnnnnnnnnnnnnnnnnnnnnnnnnnnnnnnnnnnnnnnnnnnnnnnnnnnnnnnnnnnnnnnnnnnnnnnnnnnnnnnnnnnnnnnnnnnnnnnnnnnnnnnnnnnnnnnnnnnnnnnnnnnnnnnnnnnnnnnnnnnnnnnnnnnnnnnnnnnnnnnnnnnnnnnnnnnnnnnnnnnnnnnnnnnnnnnnnnnnnnnnnnnnnnnnnnnnnnnnnnnnnnnnnnnnnnnnnnnnnnnnnnnnnnnnnnnnnnnnnnnnnnnnnnnnnnnnnnnnnnnnnnnnnnnnnnnnnnnnnnnnnnnnnnnnnnnnnnnnnnnnnnnnnnnnnnnnnnnnnnnnnnnnnnnnnnnnnnnnnnnnnnnnnnnnnnnnnnnnnnnnnnnnnnnnnnnnnnnnnnnnnnnnnnnnnnnnnnnnnnnnnnnnnnnnnnnnnnnnnnnnnnnnnnnnnnnnnnnnnnnnnnnnnnnnnnnnnnnnnnnnnnnnnnnnnnnnnnnnnnnnnnnnnnnnnnnnnnnnnnnnnnnnnnnnnnnnnnnnnnnnnnnnnnnnnnnnnnnnnnnnnnnnnnnnnnnnnnnnnnnnnnnnnnnnnnnnnnnnnnnnnnnnnnnnnnnnnnnnnnnnnnnnnnnnnnnnnnnnnnnnnnnnnnnnnnnnnnnnnnnnnnnnnnnnnnnnnnnnnnnnnnnnnnnnnnnnnnnnnnnnnnnnnnnnnnnnnnnnnnnnnnnnnnnnnnnnnnnnnnnnnnnnnnnnnnnnnnnnnnnnnnnnnnnnnnnnnnnnnnnnnnnnnnnnnnnnnnnnnnnnnnnnnnnnnnnnnnnnnnnnnnnnnnnnnnnnnnnnnnnnnnnnnnnnnnnnnnnnnnnnnnnnnnnnnnnnnnnnnnnnnnnnnnnnnnnnnnnnnnnnnnnnnnnnnnnnnnnnnnnnnnnnnnnnnnnnnnnnnnnnnnnnnnnnnnnnnnnnnnnnnnnnnnnnnnnnnnnnnnnnnnnnnnnnnnnnnnnnnnnnnnnnnnnnnnnnnnnnnnnnnnnnnnnnnnnnnnnnnnnnnnnnnnnnnnnnnnnnnnnnnnnnnnnnnnnnnnnnnnnnnnnnnnnnnnnnnnnnnnnnnnnnnnnnnnnnnnnnnnnnnnnnnnnnnnnnnnnnnnnnnnnnnnnnnnnnnnnnnnnnnnnnnnnnnnnnnnnnnnnnnnnnnnnnnnnnnnnnnnnnnnnnnnnnnnnnnnnnnnnnnnnnnnnnnnnnnnnnnnnnnnnnnnnnnnnnnnnnnnnnnnnnnnnnnnnnnnnnnnnnnnnnnnnnnnnnnnnnnnnnnnnnnnnnnnnnnnnnnnnnnnnnnnnnnnnnnnnnnnnnnnnnnnnnnnnnnnnnnnnnnnnnnnnnnnnnnnnnnnnnnnnnnnnnnnnnnnnnnnnnnnnnnnnnnnnnnnnnnnnnnnnnnnnnnnnnnnnnnnnnnnnnnnnnnnnnnnnnnnnnnnnnnnnnnnnnnnnnnnnnnnnnnnnnnnnnnnnnnnnnnnnnnnnnnnnnnnnnnnnnnnnnnnnnnnnnnnnnnnnnnnnnnnnnnnnnnnnnnnnnnnnnnnnnnnnnnnnnnnnnnnnnnnnnnnnnnnnnnnnnnnnnnnnnnnnnnnnnnnnnnnnnnnnnnnnnnnnnnnnnnnnnnnnnnnnnnnnnnnnnnnnnnnnnnnnnnnnnnnnnnnnnnnnnnnnnnnnnnnnnnnnnnnnnnnnnnnnnnnnnnnnnnnnnnnnnnnnnnnnnnnnnnnnnnnnnnnnnnnnnnnnnnnnnnnnnnnnnnnnnnnnnnnnnnnnnnnnnnnnnnnnnnnnnnnnnnnnnnnnnnnnnnnnnnnnnnnnnnnnnnnnnnnnnnnnnnnnnnnnnnnnnnnnnnnnnnnnnnnnnnnnnnnnnnnnnnnnnnnnnnnnnnnnnnnnnnnnnnnnnnnnnnnnnnnnnnnnnnnnnnnnnnnnnnnnnnnnnnnnnnnnnnnnnnnnnnnnnnnnnnnnnnnnnnnnnnnnnnnnnnnnnnnnnnnnnnnnnnnnnnnnnnnnnnnnnnnnnnnnnnnnnnnnnnnnnnnnnnnnnnnnnnnnnnnnnnnnnnnnnnnnnnnnnnnnnnnnnnnnnnnnnnnnnnnnnnnnnnnnnnnnnnnnnnnnnnnnnnnnnnnnnnnnnnnnnnnnnnnnnnnnnnnnnnnnnnnnnnnnnnnnnnnnnnnnnnnnnnnnnnnnnnnnnnnnnnnnnnnnnnnnnnnnnnnnnnnnnnnnnnnnnnnnnnnnnnnnnnnnnnnnnnnnnnnnnnnnnnnnnnnnnnnnnnnnnnnnnnnnnnnnnnnnnnnnnnnnnnnnnnnnnnnnnnnnnnnnnnnnnnnnnnnnnnnnnnnnnnnnnnnnnnnnnnnnnnnnnnnnnnnnnnnnnnnnnnnnnnnnnnnnnnnnnnnnnnnnnnnnnnnnnnnnnnnnnnnnnnnnnnnnnnnnnnnnnnnnnnnnnnnnnnnnnnnnnnnnnnnnnnnnnnnnnnnnnnnnnnnnnnnnnnnnnnnnnnnnnnnnnnnnnnnnnnnnnnnnnnnnnnnnnnnnnnnnnnnnnnnnnnnnnnnnnnnnnnnnnnnnnnnnnnnnnnnnnnnnnnnnnnnnnnnnnnnnnnnnnnnnnnnnnnnnnnnnnnnnnnnnnnnnnnnnnnnnnnnnnnnnnnnnnnnnnnnnnnnnnnnnnnnnnnnnnnnnnnnnnnnnnnnnnnnnnnnnnnnnnnnnnnnnnnnnnnnnnnnnnnnnnnnnnnnnnnnnnnnnnnnnnnnnnnnnnnnnnnnnnnnnnnnnnnnnnnnnnnnnnnnnnnnnnnnnnnnnnnnnnnnnnnnnnnnnnnnnnnnnnnnnnnnnnnnnnnnnnnnnnnnnnnnnnnnnnnnnnnnnnnnnnnnnnnnnnnnnnnnnnnnnnnnnnnnnnnnnnnnnnnnnnnnnnnnnnnnnnnnnnnnnnnnnnnnnnnnnnnnnnnnnnnnnnnnnnnnnnnnnnnnnnnnnnnnnnnnnnnnnnnnnnnnnnnnnnnnnnnnnnnnnnnnnnnnnnnnnnnnnnnnnnnnnnnnnnnnnnnnnnnnnnnnnnnnnnnnnnnnnnnnnnnnnnnnnnnnnnnnnnnnnnnnnnnnnnnnnnnnnnnnnnnnnnnnnnnnnnnnnnnnnnnnnnnnnnnnnnnnnnnnnnnnnnnnnnnnnnnnnnnnnnnnnnnnnnnnnnnnnnnnnnnnnnnnnnnnnnnnnnnnnnnnnnnnnnnnnnnnnnnnnnnnnnnnnnnnnnnnnnnnnnnnnnnnnnnnnnnnnnnnnnnnnnnnnnnnnnnnnnnnnnnnnnnnnnnnnnnnnnnnnnnnnnnnnnnnnnnnnnnnnnnnnnnnnnnnnnnnnnnnnnnnnnnnnnnnnnnnnnnnnnnnnnnnnnnnnnnnnnnnnnnnnnnnnnnnnnnnnnnnnnnnnnnnnnnnnnnnnnnnnnnnnnnnnnnnnnnnnnnnnnnnnnnnnnnnnnnnnnnnnnnnnnnnnnnnnnnnnnnnnnnnnnnnnnnnnnnnnnnnnnnnnnnnnnnnnnnnnnnnnnnnnnnnnnnnnnnnnnnnnnnnnnnnnnnnnnnnnnnnnnnnnnnnnnnnnnnnnnnnnnnnnnnnnnnnnnnnnnnnnnnnnnnnnnnnnnnnnnnnnnnnnnnnnnnnnnnnnnnnnnnnnnnnnnnnnnnnnnnnnnnnnnnnnnnnnnnnnnnnnnnnnnnnnnnnnnnnnnnnnnnnnnnnnnnnnnnnnnnnnnnnnnnnnnnnnnnnnnnnnnnnnnnnnnnnnnnnnnnnnnnnnnnnnnnnnnnnnnnnnnnnnnnnnnnnnnnnnnnnnnnnnnnnnnnnnnnnnnnnnnnnnnnnnnnnnnnnnnnnnnnnnnnnnnnnnnnnnnnnnnnnnnnnnnnnnnnnnnnnnnnnnnnnnnnnnnnnnnnnnnnnnnnnnnnnnnnnnnnnnnnnnnnnnnnnnnnnnnnnnnnnnnnnnnnnnnnnnnnnnnnnnnnnnnnnnnnnnnnnnnnnnnnnnnnnnnnnnnnnnnnnnnnnnnnnnnnnnnnnnnnnnnnnnnnnnnnnnnnnnnnnnnnnnnnnnnnnnnnnnnnnnnnnnnnnnnnnnnnnnnnnnnnnnnnnnnnnnnnnnnnnnnnnnnnnnnnnnnnnnnnnnnnnnnnnnnnnnnnnnnnnnnnnnnnnnnnnnnnnnnnnnnnnnnnnnnnnnnnnnnnnnnnnnnnnnnnnnnnnnnnnnnnnnnnnnnnnnnnnnnnnnnnnnnnnnnnnnnnnnnnnnnnnnnnnnnnnnnnnnnnnnnnnnnnnnnnnnnnnnnnnnnnnnnnnnnnnnnnnnnnnnnnnnnnnnnnnnnnnnnnnnnnnnnnnnnnnnnnnnnnnnnnnnnnnnnnnnnnnnnnnnnnnnnnnnnnnnnnnnnnnnnnnnnnnnnnnnnnnnnnnnnnnnnnnnnnnnnnnnnnnnnnnnnnnnnnnnnnnnnnnnnnnnnnnnnnnnnnnnnnnnnnnnnnnnnnnnnnnnnnnnnnnnnnnnnnnnnnnnnnnnnnnnnnnnnnnnnnnnnnnnnnnnnnnnnnnnnnnnnnnnnnnnnnnnnnnnnnnnnnnnnnnnnnnnnnnnnnnnnnnnnnnnnnnnnnnnnnnnnnnnnnnnnnnnnnnnnnnnnnnnnnnnnnnnnnnnnnnnnnnnnnnnnnnnnnnnnnnnnnnnnnnnnnnnnnnnnnnnnnnnnnnnnnnnnnnnnnnnnnnnnnnnnnnnnnnnnnnnnnnnnnnnnnnnnnnnnnnnnnnnnnnnnnnnnnnnnnnnnnnnnnnnnnnnnnnnnnnnnnnnnnnnnnnnnnnnnnnnnnnnnnnnnnnnnnnnnnnnnnnnnnnnnnnnnnnnnnnnnnnnnnnnnnnnnnnnnnnnnnnnnnnnnnnnnnnnnnnnnnnnnnnnnnnnnnnnnnnnnnnnnnnnnnnnnnnnnnnnnnnnnnnnnnnnnnnnnnnnnnnnnnnnnnnnnnnnnnnnnnnnnnnnnnnnnnnnnnnnnnnnnnnnnnnnnnnnnnnnnnnnnnnnnnnnnnnnnnnnnnnnnnnnnnnnnnnnnnnnnnnnnnnnnnnnnnnnnnnnnnnnnnnnnnnnnnnnnnnnnnnnnnnnnnnnnnnnnnnnnnnnnnnnnnnnnnnnnnnnnnnnnnnnnnnnnnnnnnnnnnnnnnnnnnnnnnnnnnnnnnnnnnnnnnnnnnnnnnnnnnnnnnnnnnnnnnnnnnnnnnnnnnnnnnnnnnnnnnnnnnnnnnnnnnnnnnnnnnnnnnnnnnnnnnnnnnnnnnnnnnnnnnnnnnnnnnnnnnnnnnnnnnnnnnnnnnnnnnnnnnnnnnnnnnnnnnnnnnnnnnnnnnnnnnnnnnnnnnnnnnnnnnnnnnnnnnnnnnnnnnnnnnnnnnnnnnnnnnnnnnnnnnnnnnnnnnnnnnnnnnnnnnnnnnnnnnnnnnnnnnnnnnnnnnnnnnnnnnnnnnnnnnnnnnnnnnnnnnnnnnnnnnnnnnnnnnnnnnnnnnnnnnnnnnnnnnnnnnnnnnnnnnnnnnnnnnnnnnnnnnnnnnnnnnnnnnnnnnnnnnnnnnnnnnnnnnnnnnnnnnnnnnnnnnnnnnnnnnnnnnnnnnnnnnnnnnnnnnnnnnnnnnnnnnnnnnnnnnnnnnnnnnnnnnnnnnnnnnnnnnnnnnnnnnnnnnnnnnnnnnnnnnnnnnnnnnnnnnnnnnnnnnnnnnnnnnnnnnnnnnnnnnnnnnnnnnnnnnnnnnnnnnnnnnnnnnnnnnnnnnnnnnnnnnnnnnnnnnnnnnnnnnnnnnnnnnnnnnnnnnnnnnnnnnnnnnnnnnnnnnnnnnnnnnnnnnnnnnnnnnnnnnnnnnnnnnnnnnnnnnnnnnnnnnnnnnnnnnnnnnnnnnnnnnnnnnnnnnnnnnnnnnnnnnnnnnnnnnnnnnnnnnnnnnnnnnnnnnnnnnnnnnnnnnnnnnnnnnnnnnnnnnnnnnnnnnnnnnnnnnnnnnnnnnnnnnnnnnnnnnnnnnnnnnnnnnnnnnnnnnnnnnnnnnnnnnnnnnnnnnnnnnnnnnnnnnnnnnnnnnnnnnnnnnnnnnnnnnnnnnnnnnnnnnnnnnnnnnnnnnnnnnnnnnnnnnnnnnnnnnnnnnnnnnnnnnnnnnnnnnnnnnnnnnnnnnnnnnnnnnnnnnnnnnnnnnnnnnnnnnnnnnnnnnnnnnnnnnnnnnnnnnnnnnnnnnnnnnnnnnnnnnnnnnnnnnnnnnnnnnnnnnnnnnnnnnnnnnnnnnnnnnnnnnnnnnnnnnnnnnnnnnnnnnnnnnnnnnnnnnnnnnnnnnnnnnnnnnnnnnnnnnnnnnnnnnnnnnnnnnnnnnnnnnnnnnnnnnnnnnnnnnnnnnnnnnnnnnnnnnnnnnnnnnnnnnnnnnnnnnnnnnnnnnnnnnnnnnnnnnnnnnnnnnnnnnnnnnnnnnnnnnnnnnnnnnnnnnnnnnnnnnnnnnnnnnnnnnnnnnnnnnnnnnnnnnnnnnnnnnnnnnnnnnnnnnnnnnnnnnnnnnnnnnnnnnnnnnnnnnnnnnnnnnnnnnnnnnnnnnnnnnnnnnnnnnnnnnnnnnnnnnnnnnnnnnnnnnnnnnnnnnnnnnnnnnnnnnnnnnnnnnnnnnnnnnnnnnnnnnnnnnnnnnnnnnnnnnnnnnnnnnnnnnnnnnnnnnnnnnnnnnnnnnnnnnnnnnnnnnnnnnnnnnnnnnnnnnnnnnnnnnnnnnnnnnnnnnnnnnnnnnnnnnnnnnnnnnnnnnnnnnnnnnnnnnnnnnnnnnnnnnnnnnnnnnnnnnnnnnnnnnnnnnnnnnnnnnnnnnnnnnnnnnnnnnnnnnnnnnnnnnnnnnnnnnnnnnnnnnnnnnnnnnnnnnnnnnnnnnnnnnnnnnnnnnnnnnnnnnnnnnnnnnnnnnnnnnnnnnnnnnnnnnnnnnnnnnnnnnnnnnnnnnnnnnnnnnnnnnnnnnnnnnnnnnnnnnnnnnnnnnnnnnnnnnnnnnnnnnnnnnnnnnnnnnnnnnnnnnnnnnnnnnnnnnnnnnnnnnnnnnnnnnnnnnnnnnnnnnnnnnnnnnnnnnnnnnnnnnnnnnnnnnnnnnnnnnnnnnnnnnnnnnnnnnnnnnnnnnnnnnnnnnnnnnnnnnnnnnnnnnnnnnnnnnnnnnnnnnnnnnnnnnnnnnnnnnnnnnnnnnnnnnnnnnnnnnnnnnnnnnnnnnnnnnnnnnnnnnnnnnnnnnnnnnnnnnnnnnnnnnnnnnnnnnnnnnnnnnnnnnnnnnnnnnnnnnnnnnnnnnnnnnnnnnnnnnnnnnnnnnnnnnnnnnnnnnnnnnnnnnnnnnnnnnnnnnnnnnnnnnnnnnnnnnnnnnnnnnnnnnnnnnnnnnnnnnnnnnnnnnnnnnnnnnnnnnnnnnnnnnnnnnnnnnnnnnnnnnnnnnnnnnnnnnnnnnnnnnnnnnnnnnnnnnnnnnnnnnnnnnnnnnnnnnnnnnnnnnnnnnnnnnnnnnnnnnnnnnnnnnnnnnnnnnnnnnnnnnnnnnnnnnnnnnnnnnnnnnnnnnnnnnnnnnnnnnnnnnnnnnnnnnnnnnnnnnnnnnnnnnnnnnnnnnnnnnnnnnnnnnnnnnnnnnnnnnnnnnnnnnnnnnnnnnnnnnnnnnnnnnnnnnnnnnnnnnnnnnnnnnnnnnnnnnnnnnnnnnnnnnnnnnnnnnnnnnnnnnnnnnnnnnnnnnnnnnnnnnnnnnnnnnnnnnnnnnnnnnnnnnnnnnnnnnnnnnnnnnnnnnnnnnnnnnnnnnnnnnnnnnnnnnnnnnnnnnnnnnnnnnnnnnnnnnnnnnnnnnnnnnnnnnnnnnnnnnnnnnnnnnnnnnnnnnnnnnnnnnnnnnnnnnnnnnnnnnnnnnnnnnnnnnnnnnnnnnnnnnnnnnnnnnnnnnnnnnnnnnnnnnnnnnnnnnnnnnnnnnnnnnnnnnnnnnnnnnnnnnnnnnnnnnnnnnnnnnnnnnnnnnnnnnnnnnnnnnnnnnnnnnnnnnnnnnnnnnnnnnnnnnnnnnnnnnnnnnnnnnnnnnnnnnnnnnnnnnnnnnnnnnnnnnnnnnnnnnnnnnnnnnnnnnnnnnnnnnnnnnnnnnnnnnnnnnnnnnnnnnnnnnnnnnnnnnnnnnnnnnnnnnnnnnnnnnnnnnnnnnnnnnnnnnnnnnnnnnnnnnnnnnnnnnnnnnnnnnnnnnnnnnnnnnnnnnnnnnnnnnnnnnnnnnnnnnnnnnnnnnnnnnnnnnnnnnnnnnnnnnnnnnnnnnnnnnnnnnnnnnnnnnnnnnnnnnnnnnnnnnnnnnnnnnnnnnnnnnnnnnnnnnnnnnnnnnnnnnnnnnnnnnnnnnnnnnnnnnnnnnnnnnnnnnnnnnnnnnnnnnnnnnnnnnnnnnnnnnnnnnnnnnnnnnnnnnnnnnnnnnnnnnnnnnnnnnnnnnnnnnnnnnnnnnnnnnnnnnnnnnnnnnnnnnnnnnnnnnnnnnnnnnnnnnnnnnnnnnnnnnnnnnnnnnnnnnnnnnnnnnnnnnnnnnnnnnnnnnnnnnnnnnnnnnnnnnnnnnnnnnnnnnnnnnnnnnnnnnnnnnnnnnnnnnnnnnnnnnnnnnnnnnnnnnnnnnnnnnnnnnnnnnnnnnnnnnnnnnnnnnnnnnnnnnnnnnnnnnnnnnnnnnnnnnnnnnnnnnnnnnnnnnnnnnnnnnnnnnnnnnnnnnnnnnnnnnnnnnnnnnnnnnnnnnnnnnnnnnnnnnnnnnnnnnnnnnnnnnnnnnnnnnnnnnnnnnnnnnnnnnnnnnnnnnnnnnnnnnnnnnnnnnnnnnnnnnnnnnnnnnnnnnnnnnnnnnnnnnnnnnnnnnnnnnnnnnnnnnnnnnnnnnnnnnnnnnnnnnnnnnnnnnnnnnnnnnnnnnnnnnnnnnnnnnnnnnnnnnnnnnnnnnnnnnnnnnnnnnnnnnnnnnnnnnnnnnnnnnnnnnnnnnnnnnnnnnnnnnnnnnnnnnnnnnnnnnnnnnnnnnnnnnnnnnnnnnnnnnnnnnnnnnnnnnnnnnnnnnnnnnnnnnnnnnnnnnnnnnnnnnnnnnnnnnnnnnnnnnnnnnnnnnnnnnnnnnnnnnnnnnnnnnnnnnnnnnnnnnnnnnnnnnnnnnnnnnnnnnnnnnnnnnnnnnnnnnnnnnnnnnnnnnnnnnnnnnnnnnnnnnnnnnnnnnnnnnnnnnnnnnnnnnnnnnnnnnnnnnnnnnnnnnnnnnnnnnnnnnnnnnnnnnnnnnnnnnnnnnnnnnnnnnnnnnnnnnnnnnnnnnnnnnnnnnnnnnnnnnnnnnnnnnnnnnnnnnnnnnnnnnnnnnnnnnnnnnnnnnnnnnnnnnnnnnnnnnnnnnnnnnnnnnnnnnnnnnnnnnnnnnnnnnnnnnnnnnnnnnnnnnnnnnnnnnnnnnnnnnnnnnnnnnnnnnnnnnnnnnnnnnnnnnnnnnnnnnnnnnnnnnnnnnnnnnnnnnnnnnnnnnnnnnnnnnnnnnnnnnnnnnnnnnnnnnnnnnnnnnnnnnnnnnnnnnnnnnnnnnnnnnnnnnnnnnnnnnnnnnnnnnnnnnnnnnnnnnnnnnnnnnnnnnnnnnnnnnnnnnnnnnnnnnnnnnnnnnnnnnnnnnnnnnnnnnnnnnnnnnnnnnnnnnnnnnnnnnnnnnnnnnnnnnnnnnnnnnnnnnnnnnnnnnnnnnnnnnnnnnnnnnnnnnnnnnnnnnnnnnnnnnnnnnnnnnnnnnnnnnnnnnnnnnnnnnnnnnnnnnnnnnnnnnnnnnnnnnnnnnnnnnnnnnnnnnnnnnnnnnnnnnnnnnnnnnnnnnnnnnnnnnnnnnnnnnnnnnnnnnnnnnnnnnnnnnnnnnnnnnnnnnnnnnnnnnnnnnnnnnnnnnnnnnnnnnnnnnnnnnnnnnnnnnnnnnnnnnnnnnnnnnnnnnnnnnnnnnnnnnnnnnnnnnnnnnnnnnnnnnnnnnnnnnnnnnnnnnnnnnnnnnnnnnnnnnnnnnnnnnnnnnnnnnnnnnnnnnnnnnnnnnnnnnnnnnnnnnnnnnnnnnnnnnnnnnnnnnnnnnnnnnnnnnnnnnnnnnnnnnnnnnnnnnnnnnnnnnnnnnnnnnnnnnnnnnnnnnnnnnnnnnnnnnnnnnnnnnnnnnnnnnnnnnnnnnnnnnnnnnnnnnnnnnnnnnnnnnnnnnnnnnnnnnnnnnnnnnnnnnnnnnnnnnnnnnnnnnnnnnnnnnnnnnnnnnnnnnnnnnnnnnnnnnnnnnnnnnnnnnnnnnnnnnnnnnnnnnnnnnnnnnnnnnnnnnnnnnnnnnnnnnnnnnnnnnnnnnnnnnnnnnnnnnnnnnnnnnnnnnnnnnnnnnnnnnnnnnnnnnnnnnnnnnnnnnnnnnnnnnnnnnnnnnnnnnnnnnnnnnnnnnnnnnnnnnnnnnnnnnnnnnnnnnnnnnnnnnnnnnnnnnnnnnnnnnnnnnnnnnnnnnnnnnnnnnnnnnnnnnnnnnnnnnnnnnnnnnnnnnnnnnnnnnnnnnnnnnnnnnnnnnnnnnnnnnnnnnnnnnnnnnnnnnnnnnnnnnnnnnnnnnnnnnnnnnnnnnnnnnnnnnnnnnnnnnnnnnnnnnnnnnnnnnnnnnnnnnnnnnnnnnnnnnnnnnnnnnnnnnnnnnnnnnnnnnnnnnnnnnnnnnnnnnnnnnnnnnnnnnnnnnnnnnnnnnnnnnnnnnnnnnnnnnnnnnnnnnnnnnnnnnnnnnnnnnnnnnnnnnnnnnnnnnnnnnnnnnnnnnnnnnnnnnnnnnnnnnnnnnnnnnnnnnnnnnnnnnnnnnnnnnnnnnnnnnnnnnnnnnnnnnnnnnnnnnnnnnnnnnnnnnnnnnnnnnnnnnnnnnnnnnnnnnnnnnnnnnnnnnnnnnnnnnnnnnnnnnnnnnnnnnnnnnnnnnnnnnnnnnnnnnnnnnnnnnnnnnnnnnnnnnnnnnnnnnnnnnnnnnnnnnnnnnnnnnnnnnnnnnnnnnnnnnnnnnnnnnnnnnnnnnnnnnnnnnnnnnnnnnnnnnnnnnnnnnnnnnnnnnnnnnnnnnnnnnnnnnnnnnnnnnnnnnnnnnnnnnnnnnnnnnnnnnnnnnnnnnnnnnnnnnnnnnnnnnnnnnnnnnnnnnnnnnnnnnnnnnnnnnnnnnnnnnnnnnnnnnnnnnnnnnnnnnnnnnnnnnnnnnnnnnnnnnnnnnnnnnnnnnnnnnnnnnnnnnnnnnnnnnnnnnnnnnnnnnnnnnnnnnnnnnnnnnnnnnnnnnnnnnnnnnnnnnnnnnnnnnnnnnnnnnnnnnnnnnnnnnnnnnnnnnnnnnnnnnnnnnnnnnnnnnnnnnnnnnnnnnnnnnnnnnnnnnnnnnnnnnnnnnnnnnnnnnnnnnnnnnnnnnnnnnnnnnnnnnnnnnnnnnnnnnnnnnnnnnnnnnnnnnnnnnnnnnnnnnnnnnnnnnnnnnnnnnnnnnnnnnnnnnnnnnnnnnnnnnnnnnnnnnnnnnnnnnnnnnnnnnnnnnnnnnnnnnnnnnnnnnnnnnnnnnnnnnnnnnnnnnnnnnnnnnnnnnnnnnnnnnnnnnnnnnnnnnnnnnnnnnnnnnnnnnnnnnnnnnnnnnnnnnnnnnnnnnnnnnnnnnnnnnnnnnnnnnnnnnnnnnnnnnnnnnnnnnnnnnnnnnnnnnnnnnnnnnnnnnnnnnnnnnnnnnnnnnnnnnnnnnnnnnnnnnnnnnnnnnnnnnnnnnnnnnnnnnnnnnnnnnnnnnnnnnnnnnnnnnnnnnnnnnnnnnnnnnnnnnnnnnnnnnnnnnnnnnnnnnnnnnnnnnnnnnnnnnnnnnnnnnnnnnnnnnnnnnnnnnnnnnnnnnnnnnnnnnnnnnnnnnnnnnnnnnnnnnnnnnnnnnnnnnnnnnnnnnnnnnnnnnnnnnnnnnnnnnnnnnnnnnnnnnnnnnnnnnnnnnnnnnnnnnnnnnnnnnnnnnnnnnnnnnnnnnnnnnnnnnnnnnnnnnnnnnnnnnnnnnnnnnnnnnnnnnnnnnnnnnnnnnnnnnnnnnnnnnnnnnnnnnnnnnnnnnnnnnnnnnnnnnnnnnnnnnnnnnnnnnnnnnnnnnnnnnnnnnnnnnnnnnnnnnnnnnnnnnnnnnnnnnnnnnnnnnnnnnnnnnnnnnnnnnnnnnnnnnnnnnnnnnnnnnnnnnnnnnnnnnnnnnnnnnnnnnnnnnnnnnnnnnnnnnnnnnnnnnnnnnnnnnnnnnnnnnnnnnnnnnnnnnnnnnnnnnnnnnnnnnnnnnnnnnnnnnnnnnnnnnnnnnnnnnnnnnnnnnnnnnnnnnnnnnnnnnnnnnnnnnnnnnnnnnnnnnnnnnnnnnnnnnnnnnnnnnnnnnnnnnnnnnnnnnnnnnnnnnnnnnnnnnnnnnnnnnnnnnnnnnnnnnnnnnnnnnnnnnnnnnnnnnnnnnnnnnnnnnnnnnnnnnnnnnnnnnnnnnnnnnnnnnnnnnnnnnnnnnnnnnnnnnnnnnnnnnnnnnnnnnnnnnnnnnnnnnnnnnnnnnnnnnnnnnnnnnnnnnnnnnnnnnnnnnnnnnnnnnnnnnnnnnnnnnnnnnnnnnnnnnnnnnnnnnnnnnnnnnnnnnnnnnnnnnnnnnnnnnnnnnnnnnnnnnnnnnnnnnnnnnnnnnnnnnnnnnnnnnnnnnnnnnnnnnnnnnnnnnnnnnnnnnnnnnnnnnnnnnnnnnnnnnnnnnnnnnnnnnnnnnnnnnnnnnnnnnnnnnnnnnnnnnnnnnnnnnnnnnnnnnnnnnnnnnnnnnnnnnnnnnnnnnnnnnnnnnnnnnnnnnnnnnnnnnnnnnnnnnnnnnnnnnnnnnnnnnnnnnnnnnnnnnnnnnnnnnnnnnnnnnnnnnnnnnnnnnnnnnnnnnnnnnnnnnnnnnnnnnnnnnnnnnnnnnnnnnnnnnnnnnnnnnnnnnnnnnnnnnnnnnnnnnnnnnnnnnnnnnnnnnnnnnnnnnnnnnnnnnnnnnnnnnnnnnnnnnnnnnnnnnnnnnnnnnnnnnnnnnnnnnnnnnnnnnnnnnnnnnnnnnnnnnnnnnnnnnnnnnnnnnnnnnnnnnnnnnnnnnnnnnnnnnnnnnnnnnnnnnnnnnnnnnnnnnnnnnnnnnnnnnnnnnnnnnnnnnnnnnnnnnnnnnnnnnnnnnnnnnnnnnnnnnnnnnnnnnnnnnnnnnnnnnnnnnnnnnnnnnnnnnnnnnnnnnnnnnnnnnnnnnnnnnnnnnnnnnnnnnnnnnnnnnnnnnnnnnnnnnnnnnnnnnnnnnnnnnnnnnnnnnnnnnnnnnnnnnnnnnnnnnnnnnnnnnnnnnnnnnnnnnnnnnnnnnnnnnnnnnnnnnnnnnnnnnnnnnnnnnnnnnnnnnnnnnnnnnnnnnnnnnnnnnnnnnnnnnnnnnnnnnnnnnnnnnnnnnnnnnnnnnnnnnnnnnnnnnnnnnnnnnnnnnnnnnnnnnnnnnnnnnnnnnnnnnnnnnnnnnnnnnnnnnnnnnnnnnnnnnnnnnnnnnnnnnnnnnnnnnnnnnnnnnnnnnnnnnnnnnnnnnnnnnnnnnnnnnnnnnnnnnnnnnnnnnnnnnnnnnnnnnnnnnnnnnnnnnnnnnnnnnnnnnnnnnnnnnnnnnnnnnnnnnnnnnnnnnnnnnnnnnnnnnnnnnnnnnnnnnnnnnnnnnnnnnnnnnnnnnnnnnnnnnnnnnnnnnnnnnnnnnnnnnnnnnnnnnnnnnnnnnnnnnnnnnnnnnnnnnnnnnnnnnnnnnnnnnnnnnnnnnnnnnnnnnnnnnnnnnnnnnnnnnnnnnnnnnnnnnnnnnnnnnnnnnnnnnnnnnnnnnnnnnnnnnnnnnnnnnnnnnnnnnnnnnnnnnnnnnnnnnnnnnnnnnnnnnnnnnnnnnnnnnnnnnnnnnnnnnnnnnnnnnnnnnnnnnnnnnnnnnnnnnnnnnnnnnnnnnnnnnnnnnnnnnnnnnnnnnnnnnnnnnnnnnnnnnnnnnnnnnnnnnnnnnnnnnnnnnnnnnnnnnnnnnnnnnnnnnnnnnnnnnnnnnnnnnnnnnnnnnnnnnnnnnnnnnnnnnnnnnnnnnnnnnnnnnnnnnnnnnnnnnnnnnnnnnnnnnnnnnnnnnnnnnnnnnnnnnnnnnnnnnnnnnnnnnnnnnnnnnnnnnnnnnnnnnnnnnnnnnnnnnnnnnnnnnnnnnnnnnnnnnnnnnnnnnnnnnnnnnnnnnnnnnnnnnnnnnnnnnnnnnnnnnnnnnnnnnnnnnnnnnnnnnnnnnnnnnnnnnnnnnnnnnnnnnnnnnnnnnnnnnnnnnnnnnnnnnnnnnnnnnnnnnnnnnnnnnnnnnnnnnnnnnnnnnnnnnnnnnnnnnnnnnnnnnnnnnnnnnnnnnnnnnnnnnnnnnnnnnnnnnnnnnnnnnnnnnnnnnnnnnnnnnnnnnnnnnnnnnnnnnnnnnnnnnnnnnnnnnnnnnnnnnnnnnnnnnnnnnnnnnnnnnnnnnnnnnnnnnnnnnnnnnnnnnnnnnnnnnnnnnnnnnnnnnnnnnnnnnnnnnnnnnnnnnnnnnnnnnnnnnnnnnnnnnnnnnnnnnnnnnnnnnnnnnnnnnnnnnnnnnnnnnnnnnnnnnnnnnnnnnnnnnnnnnnnnnnnnnnnnnnnnnnnnnnnnnnnnnnnnnnnnnnnnnnnnnnnnnnnnnnnnnnnnnnnnnnnnnnnnnnnnnnnnnnnnnnnnnnnnnnnnnnnnnnnnnnnnnnnnnnnnnnnnnnnnnnnnnnnnnnnnnnnnnnnnnnnnnnnnnnnnnnnnnnnnnnnnnnnnnnnnnnnnnnnnnnnnnnnnnnnnnnnnnnnnnnnnnnnnnnnnnnnnnnnnnnnnnnnnnnnnnnnnnnnnnnnnnnnnnnnnnnnnnnnnnnnnnnnnnnnnnnnnnnnnnnnnnnnnnnnnnnnnnnnnnnnnnnnnnnnnnnnnnnnnnnnnnnnnnnnnnnnnnnnnnnnnnnnnnnnnnnnnnnnnnnnnnnnnnnnnnnnnnnnnnnnnnnnnnnnnnnnnnnnnnnnnnnnnnnnnnnnnnnnnnnnnnnnnnnnnnnnnnnnnnnnnnnnnnnnnnnnnnnnnnnnnnnnnnnnnnnnnnnnnnnnnnnnnnnnnnnnnnnnnnnnnnnnnnnnnnnnnnnnnnnnnnnnnnnnnnnnnnnnnnnnnnnnnnnnnnnnnnnnnnnnnnnnnnnnnnnnnnnnnnnnnnnnnnnnnnnnnnnnnnnnnnnnnnnnnnnnnnnnnnnnnnnnnnnnnnnnnnnnnnnnnnnnnnnnnnnnnnnnnnnnnnnnnnnnnnnnnnnnnnnnnnnnnnnnnnnnnnnnnnnnnnnnnnnnnnnnnnnnnnnnnnnnnnnnnnnnnnnnnnnnnnnnnnnnnnnnnnnnnnnnnnnnnnnnnnnnnnnnnnnnnnnnnnnnnnnnnnnnnnnnnnnnnnnnnnnnnnnnnnnnnnnnnnnnnnnnnnnnnnnnnnnnnnnnnnnnnnnnnnnnnnnnnnnnnnnnnnnnnnnnnnnnnnnnnnnnnnnnnnnnnnnnnnnnnnnnnnnnnnnnnnnnnnnnnnnnnnnnnnnnnnnnnnnnnnnnnnnnnnnnnnnnnnnnnnnnnnnnnnnnnnnnnnnnnnnnnnnnnnnnnnnnnnnnnnnnnnnnnnnnnnnnnnnnnnnnnnnnnnnnnnnnnnnnnnnnnnnnnnnnnnnnnnnnnnnnnnnnnnnnnnnnnnnnnnnnnnnnnnnnnnnnnnnnnnnnnnnnnnnnnnnnnnnnnnnnnnnnnnnnnnnnnnnnnnnnnnnnnnnnnnnnnnnnnnnnnnnnnnnnnnnnnnnnnnnnnnnnnnnnnnnnnnnnnnnnnnnnnnnnnnnnnnnnnnnnnnnnnnnnnnnnnnnnnnnnnnnnnnnnnnnnnnnnnnnnnnnnnnnnnnnnnnnnnnnnnnnnnnnnnnnnnnnnnnnnnnnnnnnnnnnnnnnnnnnnnnnnnnnnnnnnnnnnnnnnnnnnnnnnnnnnnnnnnnnnnnnnnnnnnnnnnnnnnnnnnnnnnnnnnnnnnnnnnnnnnnnnnnnnnnnnnnnnnnnnnnnnnnnnnnnnnnnnnnnnnnnnnnnnnnnnnnnnnnnnnnnnnnnnnnnnnnnnnnnnnnnnnnnnnnnnnnnnnnnnnnnnnnnnnnnnnnnnnnnnnnnnnnnnnnnnnnnnnnnnnnnnnnnnnnnnnnnnnnnnnnnnnnnnnnnnnnnnnnnnnnnnnnnnnnnnnnnnnnnnnnnnnnnnnnnnnnnnnnnnnnnnnnnnnnnnnnnnnnnnnnnnnnnnnnnnnnnnnnnnnnnnnnnnnnnnnnnnnnnnnnnnnnnnnnnnnnnnnnnnnnnnnnnnnnnnnnnnnnnnnnnnnnnnnnnnnnnnnnnnnnnnnnnnnnnnnnnnnnnnnnnnnnnnnnnnnnnnnnnnnnnnnnnnnnnnnnnnnnnnnnnnnnnnnnnnnnnnnnnnnnnnnnnnnnnnnnnnnnnnnnnnnnnnnnnnnnnnnnnnnnnnnnnnnnnnnnnnnnnnnnnnnnnnnnnnnnnnnnnnnnnnnnnnnnnnnnnnnnnnnnnnnnnnnnnnnnnnnnnnnnnnnnnnnnnnnnnnnnnnnnnnnnnnnnnnnnnnnnnnnnnnnnnnnnnnnnnnnnnnnnnnnnnnnnnnnnnnnnnnnnnnnnnnnnnnnnnnnnnnnnnnnnnnnnnnnnnnnnnnnnnnnnnnnnnnnnnnnnnnnnnnnnnnnnnnnnnnnnnnnnnnnnnnnnnnnnnnnnnnnnnnnnnnnnnnnnnnnnnnnnnnnnnnnnnnnnnnnnnnnnnnnnnnnnnnnnnnnnnnnnnnnnnnnnnnnnnnnnnnnnnnnnnnnnnnnnnnnnnnnnnnnnnnnnnnnnnnnnnnnnnnnnnnnnnnnnnnnnnnnnnnnnnnnnnnnnnnnnnnnnnnnnnnnnnnnnnnnnnnnnnnnnnnnnnnnnnnnnnnnnnnnnnnnnnnnnnnnnnnnnnnnnnnnnnnnnnnnnnnnnnnnnnnnnnnnnnnnnnnnnnnnnnnnnnnnnnnnnnnnnnnnnnnnnnnnnnnnnnnnnnnnnnnnnnnnnnnnnnnnnnnnnnnnnnnnnnnnnnnnnnnnnnnnnnnnnnnnnnnnnnnnnnnnnnnnnnnnnnnnnnnnnnnnnnnnnnnnnnnnnnnnnnnnnnnnnnnnnnnnnnnnnnnnnnnnnnnnnnnnnnnnnnnnnnnnnnnnnnnnnnnnnnnnnnnnnnnnnnnnnnnnnnnnnnnnnnnnnnnnnnnnnnnnnnnnnnnnnnnnnnnnnnnnnnnnnnnnnnnnnnnnnnnnnnnnnnnnnnnnnnnnnnnnnnnnnnnnnnnnnnnnnnnnnnnnnnnnnnnnnnnnnnnnnnnnnnnnnnnnnnnnnnnnnnnnnnnnnnnnnnnnnnnnnnnnnnnnnnnnnnnnnnnnnnnnnnnnnnnnnnnnnnnnnnnnnnnnnnnnnnnnnnnnnnnnnnnnnnnnnnnnnnnnnnnnnnnnnnnnnnnnnnnnnnnnnnnnnnnnnnnnnnnnnnnnnnnnnnnnnnnnnnnnnnnnnnnnnnnnnnnnnnnnnnnnnnnnnnnnnnnnnnnnnnnnnnnnnnnnnnnnnnnnnnnnnnnnnnnnnnnnnnnnnnnnnnnnnnnnnnnnnnnnnnnnnnnnnnnnnnnnnnnnnnnnnnnnnnnnnnnnnnnnnnnnnnnnnnnnnnnnnnnnnnnnnnnnnnnnnnnnnnnnnnnnnnnnnnnnnnnnnnnnnnnnnnnnnnnnnnnnnnnnnnnnnnnnnnnnnnnnnnnnnnnnnnnnnnnnnnnnnnnnnnnnnnnnnnnnnnnnnnnnnnnnnnnnnnnnnnnnnnnnnnnnnnnnnnnnnnnnnnnnnnnnnnnnnnnnnnnnnnnnnnnnnnnnnnnnnnnnnnnnnnnnnnnnnnnnnnnnnnnnnnnnnnnnnnnnnnnnnnnnnnnnnnnnnnnnnnnnnnnnnnnnnnnnnnnnnnnnnnnnnnnnnnnnnnnnnnnnnnnnnnnnnnnnnnnnnnnnnnnnnnnnnnnnnnnnnnnnnnnnnnnnnnnnnnnnnnnnnnnnnnnnnnnnnnnnnnnnnnnnnnnnnnnnnnnnnnnnnnnnnnnnnnnnnnnnnnnnnnnnnnnnnnnnnnnnnnnnnnnnnnnnnnnnnnnnnnnnnnnnnnnnnnnnnnnnnnnnnnnnnnnnnnnnnnnnnnnnnnnnnnnnnnnnnnnnnnnnnnnnnnnnnnnnnnnnnnnnnnnnnnnnnnnnnnnnnnnnnnnnnnnnnnnnnnnnnnnnnnnnnnnnnnnnnnnnnnnnnnnnnnnnnnnnnnnnnnnnnnnnnnnnnnnnnnnnnnnnnnnnnnnnnnnnnnnnnnnnnnnnnnnnnnnnnnnnnnnnnnnnnnnnnnnnnnnnnnnnnnnnnnnnnnnnnnnnnnnnnnnnnnnnnnnnnnnnnnnnnnnnnnnnnnnnnnnnnnnnnnnnnnnnnnnnnnnnnnnnnnnnnnnnnnnnnnnnnnnnnnnnnnnnnnnnnnnnnnnnnnnnnnnnnnnnnnnnnnnnnnnnnnnnnnnnnnnnnnnnnnnnnnnnnnnnnnnnnnnnnnnnnnnnnnnnnnnnnnnnnnnnnnnnnnnnnnnnnnnnnnnnnnnnnnnnnnnnnnnnnnnnnnnnnnnnnnnnnnnnnnnnnnnnnnnnnnnnnnnnnnnnnnnnnnnnnnnnnnnnnnnnnnnnnnnnnnnnnnnnnnnnnnnnnnnnnnnnnnnnnnnnnnnnnnnnnnnnnnnnnnnnnnnnnnnnnnnnnnnnnnnnnnnnnnnnnnnnnnnnnnnnnnnnnnnnnnnnnnnnnnnnnnnnnnnnnnnnnnnnnnnnnnnnnnnnnnnnnnnnnnnnnnnnnnnnnnnnnnnnnnnnnnnnnnnnnnnnnnnnnnnnnnnnnnnnnnnnnnnnnnnnnnnnnnnnnnnnnnnnnnnnnnnnnnnnnnnnnnnnnnnnnnnnnnnnnnnnnnnnnnnnnnnnnnnnnnnnnnnnnnnnnnnnnnnnnnnnnnnnnnnnnnnnnnnnnnnnnnnnnnnnnnnnnnnnnnnnnnnnnnnnnnnnnnnnnnnnnnnnnnnnnnnnnnnnnnnnnnnnnnnnnnnnnnnnnnnnnnnnnnnnnnnnnnnnnnnnnnnnnnnnnnnnnnnnnnnnnnnnnnnnnnnnnnnnnnnnnnnnnnnnnnnnnnnnnnnnnnnnnnnnnnnnnnnnnnnnnnnnnnnnnnnnnnnnnnnnnnnnnnnnnnnnnnnnnnnnnnnnnnnnnnnnnnnnnnnnnnnnnnnnnnnnnnnnnnnnnnnnnnnnnnnnnnnnnnnnnnnnnnnnnnnnnnnnnnnnnnnnnnnnnnnnnnnnnnnnnnnnnnnnnnnnnnnnnnnnnnnnnnnnnnnnnnnnnnnnnnnnnnnnnnnnnnnnnnnnnnnnnnnnnnnnnnnnnnnnnnnnnnnnnnnnnnnnnnnnnnnnnnnnnnnnnnnnnnnnnnnnnnnnnnnnnnnnnnnnnnnnnnnnnnnnnnnnnnnnnnnnnnnnnnnnnnnnnnnnnnnnnnnnnnnnnnnnnnnnnnnnnnnnnnnnnnnnnnnnnnnnnnnnnnnnnnnnnnnnnnnnnnnnnnnnnnnnnnnnnnnnnnnnnnnnnnnnnnnnnnnnnnnnnnnnnnnnnnnnnnnnnnnnnnnnnnnnnnnnnnnnnnnnnnnnnnnnnnnnnnnnnnnnnnnnnnnnnnnnnnnnnnnnnnnnnnnnnnnnnnnnnnnnnnnnnnnnnnnnnnnnnnnnnnnnnnnnnnnnnnnnnnnnnnnnnnnnnnnnnnnnnnnnnnnnnnnnnnnnnnnnnnnnnnnnnnnnnnnnnnnnnnnnnnnnnnnnnnnnnnnnnnnnnnnnnnnnnnnnnnnnnnnnnnnnnnnnnnnnnnnnnnnnnnnnnnnnnnnnnnnnnnnnnnnnnnnnnnnnnnnnnnnnnnnnnnnnnnnnnnnnnnnnnnnnnnnnnnnnnnnnnnnnnnnnnnnnnnnnnnnnnnnnnnnnnnnnnnnnnnnnnnnnnnnnnnnnnnnnnnnnnnnnnnnnnnnnnnnnnnnnnnnnnnnnnnnnnnnnnnnnnnnnnnnnnnnnnnnnnnnnnnnnnnnnnnnnnnnnnnnnnnnnnnnnnnnnnnnnnnnnnnnnnnnnnnnnnnnnnnnnnnnnnnnnnnnnnnnnnnnnnnnnnnnnnnnnnnnnnnnnnnnnnnnnnnnnnnnnnnnnnnnnnnnnnnnnnnnnnnnnnnnnnnnnnnnnnnnnnnnnnnnnnnnnnnnnnnnnnnnnnnnnnnnnnnnnnnnnnnnnnnnnnnnnnnnnnnnnnnnnnnnnnnnnnnnnnnnnnnnnnnnnnnnnnnnnnnnnnnnnnnnnnnnnnnnnnnnnnnnnnnnnnnnnnnnnnnnnnnnnnnnnnnnnnnnnnnnnnnnnnnnnnnnnnnnnnnnnnnnnnnnnnnnnnnnnnnnnnnnnnnnnnnnnnnnnnnnnnnnnnnnnnnnnnnnnnnnnnnnnnnnnnnnnnnnnnnnnnnnnnnnnnnnnnnnnnnnnnnnnnnnnnnnnnnnnnnnnnnnnnnnnnnnnnnnnnnnnnnnnnnnnnnnnnnnnnnnnnnnnnnnnnnnnnnnnnnnnnnnnnnnnnnnnnnnnnnnnnnnnnnnnnnnnnnnnnnnnnnnnnnnnnnnnnnnnnnnnnnnnnnnnnnnnnnnnnnnnnnnnnnnnnnnnnnnnnnnnnnnnnnnnnnnnnnnnnnnnnnnnnnnnnnnnnnnnnnnnnnnnnnnnnnnnnnnnnnnnnnnnnnnnnnnnnnnnnnnnnnnnnnnnnnnnnnnnnnnnnnnnnnnnnnnnnnnnnnnnnnnnnnnnnnnnnnnnnnnnnnnnnnnnnnnnnnnnnnnnnnnnnnnnnnnnnnnnnnnnnnnnnnnnnnnnnnnnnnnnnnnnnnnnnnnnnnnnnnnnnnnnnnnnnnnnnnnnnnnnnnnnnnnnnnnnnnnnnnnnnnnnnnnnnnnnnnnnnnnnnnnnnnnnnnnnnnnnnnnnnnnnnnnnnnnnnnnnnnnnnnnnnnnnnnnnnnnnnnnnnnnnnnnnnnnnnnnnnnnnnnnnnnnnnnnnnnnnnnnnnnnnnnnnnnnnnnnnnnnnnnnnnnnnnnnnnnnnnnnnnnnnnnnnnnnnnnnnnnnnnnnnnnnnnnnnnnnnnnnnnnnnnnnnnnnnnnnnnnnnnnnnnnnnnnnnnnnnnnnnnnnnnnnnnnnnnnnnnnnnnnnnnnnnnnnnnnnnnnnnnnnnnnnnnnnnnnnnnnnnnnnnnnnnnnnnnnnnnnnnnnnnnnnnnnnnnnnnnnnnnnnnnnnnnnnnnnnnnnnnnnnnnnnnnnnnnnnnnnnnnnnnnnnnnnnnnnnnnnnnnnnnnnnnnnnnnnnnnnnnnnnnnnnnnnnnnnnnnnnnnnnnnnnnnnnnnnnnnnnnnnnnnnnnnnnnnnnnnnnnnnnnnnnnnnnnnnnnnnnnnnnnnnnnnnnnnnnnnnnnnnnnnnnnnnnnnnnnnnnnnnnnnnnnnnnnnnnnnnnnnnnnnnnnnnnnnnnnnnnnnnnnnnnnnnnnnnnnnnnnnnnnnnnnnnnnnnnnnnnnnnnnnnnnnnnnnnnnnnnnnnnnnnnnnnnnnnnnnnnnnnnnnnnnnnnnnnnnnnnnnnnnnnnnnnnnnnnnnnnnnnnnnnnnnnnnnnnnnnnnnnnnnnnnnnnnnnnnnnnnnnnnnnnnnnnnnnnnnnnnnnnnnnnnnnnnnnnnnnnnnnnnnnnnnnnnnnnnnnnnnnnnnnnnnnnnnnnnnnnnnnnnnnnnnnnnnnnnnnnnnnnnnnnnnnnnnnnnnnnnnnnnnnnnnnnnnnnnnnnnnnnnnnnnnnnnnnnnnnnnnnnnnnnnnnnnnnnnnnnnnnnnnnnnnnnnnnnnnnnnnnnnnnnnnnnnnnnnnnnnnnnnnnnnnnnnnnnnnnnnnnnnnnnnnnnnnnnnnnnnnnnnnnnnnnnnnnnnnnnnnnnnnnnnnnnnnnnnnnnnnnnnnnnnnnnnnnnnnnnnnnnnnnnnnnnnnnnnnnnnnnnnnnnnnnnnnnnnnnnnnnnnnnnnnnnnnnnnnnnnnnnnnnnnnnnnnnnnnnnnnnnnnnnnnnnnnnnnnnnnnnnnnnnnnnnnnnnnnnnnnnnnnnnnnnnnnnnnnnnnnnnnnnnnnnnnnnnnnnnnnnnnnnnnnnnnnnnnnnnnnnnnnnnnnnnnnnnnnnnnnnnnnnnnnnnnnnnnnnnnnnnnnnnnnnnnnnnnnnnnnnnnnnnnnnnnnnnnnnnnnnnnnnnnnnnnnnnnnnnnnnnnnnnnnnnnnnnnnnnnnnnnnnnnnnnnnnnnnnnnnnnnnnnnnnnnnnnnnnnnnnnnnnnnnnnnnnnnnnnnnnnnnnnnnnnnnnnnnnnnnnnnnnnnnnnnnnnnnnnnnnnnnnnnnnnnnnnnnnnnnnnnnnnnnnnnnnnnnnnnnnnnnnnnnnnnnnnnnnnnnnnnnnnnnnnnnnnnnnnnnnnnnnnnnnnnnnnnnnnnnnnnnnnnnnnnnnnnnnnnnnnnnnnnnnnnnnnnnnnnnnnnnnnnnnnnnnnnnnnnnnnnnnnnnnnnnnnnnnnnnnnnnnnnnnnnnnnnnnnnnnnnnnnnnnnnnnnnnnnnnnnnnnnnnnnnnnnnnnnnnnnnnnnnnnnnnnnnnnnnnnnnnnnnnnnnnnnnnnnnnnnnnnnnnnnnnnnnnnnnnnnnnnnnnnnnnnnnnnnnnnnnnnnnnnnnnnnnnnnnnnnnnnnnnnnnnnnnnnnnnnnnnnnnnnnnnnnnnnnnnnnnnnnnnnnnnnnnnnnnnnnnnnnnnnnnnnnnnnnnnnnnnnnnnnnnnnnnnnnnnnnnnnnnnnnnnnnnnnnnnnnnnnnnnnnnnnnnnnnnnnnnnnnnnnnnnnnnnnnnnnnnnnnnnnnnnnnnnnnnnnnnnnnnnnnnnnnnnnnnnnnnnnnnnnnnnnnnnnnnnnnnnnnnnnnnnnnnnnnnnnnnnnnnnnnnnnnnnnnnnnnnnnnnnnnnnnnnnnnnnnnnnnnnnnnnnnnnnnnnnnnnnnnnnnnnnnnnnnnnnnnnnnnnnnnnnnnnnnnnnnnnnnnnnnnnnnnnnnnnnnnnnnnnnnnnnnnnnnnnnnnnnnnnnnnnnnnnnnnnnnnnnnnnnnnnnnnnnnnnnnnnnnnnnnnnnnnnnnnnnnnnnnnnnnnnnnnnnnnnnnnnnnnnnnnnnnnnnnnnnnnnnnnnnnnnnnnnnnnnnnnnnnnnnnnnnnnnnnnnnnnnnnnnnnnnnnnnnnnnnnnnnnnnnnnnnnnnnnnnnnnnnnnnnnnnnnnnnnnnnnnnnnnnnnnnnnnnnnnnnnnnnnnnnnnnnnnnnnnnnnnnnnnnnnnnnnnnnnnnnnnnnnnnnnnnnnnnnnnnnnnnnnnnnnnnnnnnnnnnnnnnnnnnnnnnnnnnnnnnnnnnnnnnnnnnnnnnnnnnnnnnnnnnnnnnnnnnnnnnnnnnnnnnnnnnnnnnnnnnnnnnnnnnnnnnnnnnnnnnnnnnnnnnnnnnnnnnnnnnnnnnnnnnnnnnnnnnnnnnnnnnnnnnnnnnnnnnnnnnnnnnnnnnnnnnnnnnnnnnnnnnnnnnnnnnnnnnnnnnnnnnnnnnnnnnnnnnnnnnnnnnnnnnnnnnnnnnnnnnnnnnnnnnnnnnnnnnnnnnnnnnnnnnnnnnnnnnnnnnnnnnnnnnnnnnnnnnnnnnnnnnnnnnnnnnnnnnnnnnnnnnnnnnnnnnnnnnnnnnnnnnnnnnnnnnnnnnnnnnnnnnnnnnnnnnnnnnnnnnnnnnnnnnnnnnnnnnnnnnnnnnnnnnnnnnnnnnnnnnnnnnnnnnnnnnnnnnnnnnnnnnnnnnnnnnnnnnnnnnnnnnnnnnnnnnnnnnnnnnnnnnnnnnnnnnnnnnnnnnnnnnnnnnnnnnnnnnnnnnnnnnnnnnnnnnnnnnnnnnnnnnnnnnnnnnnnnnnnnnnnnnnnnnnnnnnnnnnnnnnnnnnnnnnnnnnnnnnnnnnnnnnnnnnnnnnnnnnnnnnnnnnnnnnnnnnnnnnnnnnnnnnnnnnnnnnnnnnnnnnnnnnnnnnnnnnnnnnnnnnnnnnnnnnnnnnnnnnnnnnnnnnnnnnnnnnnnnnnnnnnnnnnnnnnnnnnnnnnnnnnnnnnnnnnnnnnnnnnnnnnnnnnnnnnnnnnnnnnnnnnnnnnnnnnnnnnnnnnnnnnnnnnnnnnnnnnnnnnnnnnnnnnnnnnnnnnnnnnnnnnnnnnnnnnnnnnnnnnnnnnnnnnnnnnnnnnnnnnnnnnnnnnnnnnnnnnnnnnnnnnnnnnnnnnnnnnnnnnnnnnnnnnnnnnnnnnnnnnnnnnnnnnnnnnnnnnnnnnnnnnnnnnnnnnnnnnnnnnnnnnnnnnnnnnnnnnnnnnnnnnnnnnnnnnnnnnnnnnnnnnnnnnnnnnnnnnnnnnnnnnnnnnnnnnnnnnnnnnnnnnnnnnnnnnnnnnnnnnnnnnnnnnnnnnnnnnnnnnnnnnnnnnnnnnnnnnnnnnnnnnnnnnnnnnnnnnnnnnnnnnnnnnnnnnnnnnnnnnnnnnnnnnnnnnnnnnnnnnnnnnnnnnnnnnnnnnnnnnnnnnnnnnnnnnnnnnnnnnnnnnnnnnnnnnnnnnnnnnnnnnnnnnnnnnnnnnnnnnnnnnnnnnnnnnnnnnnnnnnnnnnnnnnnnnnnnnnnnnnnnnnnnnnnnnnnnnnnnnnnnnnnnnnnnnnnnnnnnnnnnnnnnnnnnnnnnnnnnnnnnnnnnnnnnnnnnnnnnnnnnnnnnnnnnnnnnnnnnnnnnnnnnnnnnnnnnnnnnnnnnnnnnnnnnnnnnnnnnnnnnnnnnnnnnnnnnnnnnnnnnnnnnnnnnnnnnnnnnnnnnnnnnnnnnnnnnnnnnnnnnnnnnnnnnnnnnnnnnnnnnnnnnnnnnnnnnnnnnnnnnnnnnnnnnnnnnnnnnnnnnnnnnnnnnnnnnnnnnnnnnnnnnnnnnnnnnnnnnnnnnnnnnnnnnnnnnnnnnnnnnnnnnnnnnnnnnnnnnnnnnnnnnnnnnnnnnnnnnnnnnnnnnnnnnnnnnnnnnnnnnnnnnnnnnnnnnnnnnnnnnnnnnnnnnnnnnnnnnnnnnnnnnnnnnnnnnnnnnnnnnnnnnnnnnnnnnnnnnnnnnnnnnnnnnnnnnnnnnnnnnnnnnnnnnnnnnnnnnnnnnnnnnnnnnnnnnnnnnnnnnnnnnnnnnnnnnnnnnnnnnnnnnnnnnnnnnnnnnnnnnnnnnnnnnnnnnnnnnnnnnnnnnnnnnnnnnnnnnnnnnnnnnnnnnnnnnnnnnnnnnnnnnnnnnnnnnnnnnnnnnnnnnnnnnnnnnnnnnnnnnnnnnnnnnnnnnnnnnnnnnnnnnnnnnnnnnnnnnnnnnnnnnnnnnnnnnnnnnnnnnnnnnnnnnnnnnnnnnnnnnnnnnnnnnnnnnnnnnnnnnnnnnnnnnnnnnnnnnnnnnnnnnnnnnnnnnnnnnnnnnnnnnnnnnnnnnnnnnnnnnnnnnnnnnnnnnnnnnnnnnnnnnnnnnnnnnnnnnnnnnnnnnnnnnnnnnnnnnnnnnnnnnnnnnnnnnnnnnnnnnnnnnnnnnnnnnnnnnnnnnnnnnnnnnnnnnnnnnnnnnnnnnnnnnnnnnnnnnnnnnnnnnnnnnnnnnnnnnnnnnnnnnnnnnnnnnnnnnnnnnnnnnnnnnnnnnnnnnnnnnnnnnnnnnnnnnnnnnnnnnnnnnnnnnnnnnnnnnnnnnnnnnnnnnnnnnnnnnnnnnnnnnnnnnnnnnnnnnnnnnnnnnnnnnnnnnnnnnnnnnnnnnnnnnnnnnnnnnnnnnnnnnnnnnnnnnnnnnnnnnnnnnnnnnnnnnnnnnnnnnnnnnnnnnnnnnnnnnnnnnnnnnnnnnnnnnnnnnnnnnnnnnnnnnnnnnnnnnnnnnnnnnnnnnnnnnnnnnnnnnnnnnnnnnnnnnnnnnnnnnnnnnnnnnnnnnnnnnnnnnnnnnnnnnnnnnnnnnnnnnnnnnnnnnnnnnnnnnnnnnnnnnnnnnnnnnnnnnnnnnnnnnnnnnnnnnnnnnnnnnnnnnnnnnnnnnnnnnnnnnnnnnnnnnnnnnnnnnnnnnnnnnnnnnnnnnnnnnnnnnnnnnnnnnnnnnnnnnnnnnnnnnnnnnnnnnnnnnnnnnnnnnnnnnnnnnnnnnnnnnnnnnnnnnnnnnnnnnnnnnnnnnnnnnnnnnnnnnnnnnnnnnnnnnnnnnnnnnnnnnnnnnnnnnnnnnnnnnnnnnnnnnnnnnnnnnnnnnnnnnnnnnnnnnnnnnnnnnnnnnnnnnnnnnnnnnnnnnnnnnnnnnnnnnnnnnnnnnnnnnnnnnnnnnnnnnnnnnnnnnnnnnnnnnnnnnnnnnnnnnnnnnnnnnnnnnnnnnnnnnnnnnnnnnnnnnnnnnnnnnnnnnnnnnnnnnnnnnnnnnnnnnnnnnnnnnnnnnnnnnnnnnnnnnnnnnnnnnnnnnnnnnnnnnnnnnnnnnnnnnnnnnnnnnnnnnnnnnnnnnnnnnnnnnnnnnnnnnnnnnnnnnnnnnnnnnnnnnnnnnnnnnnnnnnnnnnnnnnnnnnnnnnnnnnnnnnnnnnnnnnnnnnnnnnnnnnnnnnnnnnnnnnnnnnnnnnnnnnnnnnnnnnnnnnnnnnnnnnnnnnnnnnnnnnnnnnnnnnnnnnnnnnnnnnnnnnnnnnnnnnnnnnnnnnnnnnnnnnnnnnnnnnnnnnnnnnnnnnnnnnnnnnnnnnnnnnnnnnnnnnnnnnnnnnnnnnnnnnnnnnnnnnnnnnnnnnnnnnnnnnnnnnnnnnnnnnnnnnnnnnnnnnnnnnnnnnnnnnnnnnnnnnnnnnnnnnnnnnnnnnnnnnnnnnnnnnnnnnnnnnnnnnnnnnnnnnnnnnnnnnnnnnnnnnnnnnnnnnnnnnnnnnnnnnnnnnnnnnnnnnnnnnnnnnnnnnnnnnnnnnnnnnnnnnnnnnnnnnnnnnnnnnnnnnnnnnnnnnnnnnnnnnnnnnnnnnnnnnnnnnnnnnnnnnnnnnnnnnnnnnnnnnnnnnnnnnnnnnnnnnnnnnnnnnnnnnnnnnnnnnnnnnnnnnnnnnnnnnnnnnnnnnnnnnnnnnnnnnnnnnnnnnnnnnnnnnnnnnnnnnnnnnnnnnnnnnnnnnnnnnnnnnnnnnnnnnnnnnnnnnnnnnnnnnnnnnnnnnnnnnnnnnnnnnnnnnnnnnnnnnnnnnnnnnnnnnnnnnnnnnnnnnnnnnnnnnnnnnnnnnnnnnnnnnnnnnnnnnnnnnnnnnnnnnnnnnnnnnnnnnnnnnnnnnnnnnnnnnnnnnnnnnnnnnnnnnnnnnnnnnnnnnnnnnnnnnnnnnnnnnnnnnnnnnnnnnnnnnnnnnnnnnnnnnnnnnnnnnnnnnnnnnnnnnnnnnnnnnnnnnnnnnnnnnnnnnnnnnnnnnnnnnnnnnnnnnnnnnnnnnnnnnnnnnnnnnnnnnnnnnnnnnnnnnnnnnnnnnnnnnnnnnnnnnnnnnnnnnnnnnnnnnnnnnnnnnnnnnnnnnnnnnnnnnnnnnnnnnnnnnnnnnnnnnnnnnnnnnnnnnnnnnnnnnnnnnnnnnnnnnnnnnnnnnnnnnnnnnnnnnnnnnnnnnnnnnnnnnnnnnnnnnnnnnnnnnnnnnnnnnnnnnnnnnnnnnnnnnnnnnnnnnnnnnnnnnnnnnnnnnnnnnnnnnnnnnnnnnnnnnnnnnnnnnnnnnnnnnnnnnnnnnnnnnnnnnnnnnnnnnnnnnnnnnnnnnnnnnnnnnnnnnnnnnnnnnnnnnnnnnnnnnnnnnnnnnnnnnnnnnnnnnnnnnnnnnnnnnnnnnnnnnnnnnnnnnnnnnnnnnnnnnnnnnnnnnnnnnnnnnnnnnnnnnnnnnnnnnnnnnnnnnnnnnnnnnnnnnnnnnnnnnnnnnnnnnnnnnnnnnnnnnnnnnnnnnnnnnnnnnnnnnnnnnnnnnnnnnnnnnnnnnnnnnnnnnnnnnnnnnnnnnnnnnnnnnnnnnnnnnnnnnnnnnnnnnnnnnnnnnnnnnnnnnnnnnnnnnnnnnnnnnnnnnnnnnnnnnnnnnnnnnnnnnnnnnnnnnnnnnnnnnnnnnnnnnnnnnnnnnnnnnnnnnnnnnnnnnnnnnnnnnnnnnnnnnnnnnnnnnnnnnnnnnnnnnnnnnnnnnnnnnnnnnnnnnnnnnnnnnnnnnnnnnnnnnnnnnnnnnnnnnnnnnnnnnnnnnnnnnnnnnnnnnnnnnnnnnnnnnnnnnnnnnnnnnnnnnnnnnnnnnnnnnnnnnnnnnnnnnnnnnnnnnnnnnnnnnnnnnnnnnnnnnnnnnnnnnnnnnnnnnnnnnnnnnnnnnnnnnnnnnnnnnnnnnnnnnnnnnnnnnnnnnnnnnnnnnnnnnnnnnnnnnnnnnnnnnnnnnnnnnnnnnnnnnnnnnnnnnnnnnnnnnnnnnnnnnnnnnnnnnnnnnnnnnnnnnnnnnnnnnnnnnnnnnnnnnnnnnnnnnnnnnnnnnnnnnnnnnnnnnnnnnnnnnnnnnnnnnnnnnnnnnnnnnnnnnnnnnnnnnnnnnnnnnnnnnnnnnnnnnnnnnnnnnnnnnnnnnnnnnnnnnnnnnnnnnnnnnnnnnnnnnnnnnnnnnnnnnnnnnnnnnnnnnnnnnnnnnnnnnnnnnnnnnnnnnnnnnnnnnnnnnnnnnnnnnnnnnnnnnnnnnnnnnnnnnnnnnnnnnnnnnnnnnnnnnnnnnnnnnnnnnnnnnnnnnnnnnnnnnnnnnnnnnnnnnnnnnnnnnnnnnnnnnnnnnnnnnnnnnnnnnnnnnnnnnnnnnnnnnnnnnnnnnnnnnnnnnnnnnnnnnnnnnnnnnnnnnnnnnnnnnnnnnnnnnnnnnnnnnnnnnnnnnnnnnnnnnnnnnnnnnnnnnnnnnnnnnnnnnnnnnnnnnnnnnnnnnnnnnnnnnnnnnnnnnnnnnnnnnnnnnnnnnnnnnnnnnnnnnnnnnnnnnnnnnnnnnnnnnnnnnnnnnnnnnnnnnnnnnnnnnnnnnnnnnnnnnnnnnnnnnnnnnnnnnnnnnnnnnnnnnnnnnnnnnnnnnnnnnnnnnnnnnnnnnnnnnnnnnnnnnnnnnnnnnnnnnnnnnnnnnnnnnnnnnnnnnnnnnnnnnnnnnnnnnnnnnnnnnnnnnnnnnnnnnnnnnnnnnnnnnnnnnnnnnnnnnnnnnnnnnnnnnnnnnnnnnnnnnnnnnnnnnnnnnnnnnnnnnnnnnnnnnnnnnnnnnnnnnnnnnnnnnnnnnnnnnnnnnnnnnnnnnnnnnnnnnnnnnnnnnnnnnnnnnnnnnnnnnnnnnnnnnnnnnnnnnnnnnnnnnnnnnnnnnnnnnnnnnnnnnnnnnnnnnnnnnnnnnnnnnnnnnnnnnnnnnnnnnnnnnnnnnnnnnnnnnnnnnnnnnnnnnnnnnnnnnnnnnnnnnnnnnnnnnnnnnnnnnnnnnnnnnnnnnnnnnnnnnnnnnnnnnnnnnnnnnnnnnnnnnnnnnnnnnnnnnnnnnnnnnnnnnnnnnnnnnnnnnnnnnnnnnnnnnnnnnnnnnnnnnnnnnnnnnnnnnnnnnnnnnnnnnnnnnnnnnnnnnnnnnnnnnnnnnnnnnnnnnnnnnnnnnnnnnnnnnnnnnnnnnnnnnnnnnnnnnnnnnnnnnnnnnnnnnnnnnnnnnnnnnnnnnnnnnnnnnnnnnnnnnnnnnnnnnnnnnnnnnnnnnnnnnnnnnnnnnnnnnnnnnnnnnnnnnnnnnnnnnnnnnnnnnnnnnnnnnnnnnnnnnnnnnnnnnnnnnnnnnnnnnnnnnnnnnnnnnnnnnnnnnnnnnnnnnnnnnnnnnnnnnnnnnnnnnnnnnnnnnnnnnnnnnnnnnnnnnnnnnnnnnnnnnnnnnnnnnnnnnnnnnnnnnnnnnnnnnnnnnnnnnnnnnnnnnnnnnnnnnnnnnnnnnnnnnnnnnnnnnnnnnnnnnnnnnnnnnnnnnnnnnnnnnnnnnnnnnnnnnnnnnnnnnnnnnnnnnnnnnnnnnnnnnnnnnnnnnnnnnnnnnnnnnnnnnnnnnnnnnnnnnnnnnnnnnnnnnnnnnnnnnnnnnnnnnnnnnnnnnnnnnnnnnnnnnnnnnnnnnnnnnnnnnnnnnnnnnnnnnnnnnnnnnnnnnnnnnnnnnnnnnnnnnnnnnnnnnnnnnnnnnnnnnnnnnnnnnnnnnnnnnnnnnnnnnnnnnnnnnnnnnnnnnnnnnnnnnnnnnnnnnnnnnnnnnnnnnnnnnnnnnnnnnnnnnnnnnnnnnnnnnnnnnnnnnnnnnnnnnnnnnnnnnnnnnnnnnnnnnnnnnnnnnnnnnnnnnnnnnnnnnnnnnnnnnnnnnnnnnnnnnnnnnnnnnnnnnnnnnnnnnnnnnnnnnnnnnnnnnnnnnnnnnnnnnnnnnnnnnnnnnnnnnnnnnnnnnnnnnnnnnnnnnnnnnnnnnnnnnnnnnnnnnnnnnnnnnnnnnnnnnnnnnnnnnnnnnnnnnnnnnnnnnnnnnnnnnnnnnnnnnnnnnnnnnnnnnnnnnnnnnnnnnnnnnnnnnnnnnnnnnnnnnnnnnnnnnnnnnnnnnnnnnnnnnnnnnnnnnnnnnnnnnnnnnnnnnnnnnnnnnnnnnnnnnnnnnnnnnnnnnnnnnnnnnnnnnnnnnnnnnnnnnnnnnnnnnnnnnnnnnnnnnnnnnnnnnnnnnnnnnnnnnnnnnnnnnnnnnnnnnnnnnnnnnnnnnnnnnnnnnnnnnnnnnnnnnnnnnnnnnnnnnnnnnnnnnnnnnnnnnnnnnnnnnnnnnnnnnnnnnnnnnnnnnnnnnnnnnnnnnnnnnnnnnnnnnnnnnnnnnnnnnnnnnnnnnnnnnnnnnnnnnnnnnnnnnnnnnnnnnnnnnnnnnnnnnnnnnnnnnnnnnnnnnnnnnnnnnnnnnnnnnnnnnnnnnnnnnnnnnnnnnnnnnnnnnnnnnnnnnnnnnnnnnnnnnnnnnnnnnnnnnnnnnnnnnnnnnnnnnnnnnnnnnnnnnnnnnnnnnnnnnnnnnnnnnnnnnnnnnnnnnnnnnnnnnnnnnnnnnnnnnnnnnnnnnnnnnnnnnnnnnnnnnnnnnnnnnnnnnnnnnnnnnnnnnnnnnnnnnnnnnnnnnnnnnnnnnnnnnnnnnnnnnnnnnnnnnnnnnnnnnnnnnnnnnnnnnnnnnnnnnnnnnnnnnnnnnnnnnnnnnnnnnnnnnnnnnnnnnnnnnnnnnnnnnnnnnnnnnnnnnnnnnnnnnnnnnnnnnnnnnnnnnnnnnnnnnnnnnnnnnnnnnnnnnnnnnnnnnnnnnnnnnnnnnnnnnnnnnnnnnnnnnnnnnnnnnnnnnnnnnnnnnnnnnnnnnnnnnnnnnnnnnnnnnnnnnnnnnnnnnnnnnnnnnnnnnnnnnnnnnnnnnnnnnnnnnnnnnnnnnnnnnnnnnnnnnnnnnnnnnnnnnnnnnnnnnnnnnnnnnnnnnnnnnnnnnnnnnnnnnnnnnnnnnnnnnnnnnnnnnnnnnnnnnnnnnnnnnnnnnnnnnnnnnnnnnnnnnnnnnnnnnnnnnnnnnnnnnnnnnnnnnnnnnnnnnnnnnnnnnnnnnnnnnnnnnnnnnnnnnnnnnnnnnnnnnnnnnnnnnnnnnnnnnnnnnnnnnnnnnnnnnnnnnnnnnnnnnnnnnnnnnnnnnnnnnnnnnnnnnnnnnnnnnnnnnnnnnnnnnnnnnnnnnnnnnnnnnnnnnnnnnnnnnnnnnnnnnnnnnnnnnnnnnnnnnnnnnnnnnnnnnnnnnnnnnnnnnnnnnnnnnnnnnnnnnnnnnnnnnnnnnnnnnnnnnnnnnnnnnnnnnnnnnnnnnnnnnnnnnnnnnnnnnnnnnnnnnnnnnnnnnnnnnnnnnnnnnnnnnnnnnnnnnnnnnnnnnnnnnnnnnnnnnnnnnnnnnnnnnnnnnnnnnnnnnnnnnnnnnnnnnnnnnnnnnnnnnnnnnnnnnnnnnnnnnnnnnnnnnnnnnnnnnnnnnnnnnnnnnnnnnnnnnnnnnnnnnnnnnnnnnnnnnnnnnnnnnnnnnnnnnnnnnnnnnnnnnnnnnnnnnnnnnnnnnnnnnnnnnnnnnnnnnnnnnnnnnnnnnnnnnnnnnnnnnnnnnnnnnnnnnnnnnnnnnnnnnnnnnnnnnnnnnnnnnnnnnnnnnnnnnnnnnnnnnnnnnnnnnnnnnnnnnnnnnnnnnnnnnnnnnnnnnnnnnnnnnnnnnnnnnnnnnnnnnnnnnnnnnnnnnnnnnnnnnnnnnnnnnnnnnnnnnnnnnnnnnnnnnnnnnnnnnnnnnnnnnnnnnnnnnnnnnnnnnnnnnnnnnnnnnnnnnnnnnnnnnnnnnnnnnnnnnnnnnnnnnnnnnnnnnnnnnnnnnnnnnnnnnnnnnnnnnnnnnnnnnnnnnnnnnnnnnnnnnnnnnnnnnnnnnnnnnnnnnnnnnnnnnnnnnnnnnnnnnnnnnnnnnnnnnnnnnnnnnnnnnnnnnnnnnnnnnnnnnnnnnnnnnnnnnnnnnnnnnnnnnnnnnnnnnnnnnnnnnnnnnnnnnnnnnnnnnnnnnnnnnnnnnnnnnnnnnnnnnnnnnnnnnnnnnnnnnnnnnnnnnnnnnnnnnnnnnnnnnnnnnnnnnnnnnnnnnnnnnnnnnnnnnnnnnnnnnnnnnnnnnnnnnnnnnnnnnnnnnnnnnnnnnnnnnnnnnnnnnnnnnnnnnnnnnnnnnnnnnnnnnnnnnnnnnnnnnnnnnnnnnnnnnnnnnnnnnnnnnnnnnnnnnnnnnnnnnnnnnnnnnnnnnnnnnnnnnnnnnnnnnnnnnnnnnnnnnnnnnnnnnnnnnnnnnnnnnnnnnnnnnnnnnnnnnnnnnnnnnnnnnnnnnnnnnnnnnnnnnnnnnnnnnnnnnnnnnnnnnnnnnnnnnnnnnnnnnnnnnnnnnnnnnnnnnnnnnnnnnnnnnnnnnnnnnnnnnnnnnnnnnnnnnnnnnnnnnnnnnnnnnnnnnnnnnnnnnnnnnnnnnnnnnnnnnnnnnnnnnnnnnnnnnnnnnnnnnnnnnnnnnnnnnnnnnnnnnnnnnnnnnnnnnnnnnnnnnnnnnnnnnnnnnnnnnnnnnnnnnnnnnnnnnnnnnnnnnnnnnnnnnnnnnnnnnnnnnnnnnnnnnnnnnnnnnnnnnnnnnnnnnnnnnnnnnnnnnnnnnnnnnnnnnnnnnnnnnnnnnnnnnnnnnnnnnnnnnnnnnnnnnnnnnnnnnnnnnnnnnnnnnnnnnnnnnnnnnnnnnnnnnnnnnnnnnnnnnnnnnnnnnnnnnnnnnnnnnnnnnnnnnnnnnnnnnnnnnnnnnnnnnnnnnnnnnnnnnnnnnnnnnnnnnnnnnnnnnnnnnnnnnnnnnnnnnnnnnnnnnnnnnnnnnnnnnnnnnnnnnnnnnnnnnnnnnnnnnnnnnnnnnnnnnnnnnnnnnnnnnnnnnnnnnnnnnnnnnnnnnnnnnnnnnnnnnnnnnnnnnnnnnnnnnnnnnnnnnnnnnnnnnnnnnnnnnnnnnnnnnnnnnnnnnnnnnnnnnnnnnnnnnnnnnnnnnnnnnnnnnnnnnnnnnnnnnnnnnnnnnnnnnnnnnnnnnnnnnnnnnnnnnnnnnnnnnnnnnnnnnnnnnnnnnnnnnnnnnnnnnnnnnnnnnnnnnnnnnnnnnnnnnnnnnnnnnnnnnnnnnnnnnnnnnnnnnnnnnnnnnnnnnnnnnnnnnnnnnnnnnnnnnnnnnnnnnnnnnnnnnnnnnnnnnnnnnnnnnnnnnnnnnnnnnnnnnnnnnnnnnnnnnnnnnnnnnnnnnnnnnnnnnnnnnnnnnnnnnnnnnnnnnnnnnnnnnnnnnnnnnnnnnnnnnnnnnnnnnnnnnnnnnnnnnnnnnnnnnnnnnnnnnnnnnnnnnnnnnnnnnnnnnnnnnnnnnnnnnnnnnnnnnnnnnnnnnnnnnnnnnnnnnnnnnnnnnnnnnnnnnnnnnnnnnnnnnnnnnnnnnnnnnnnnnnnnnnnnnnnnnnnnnnnnnnnnnnnnnnnnnnnnnnnnnnnnnnnnnnnnnnnnnnnnnnnnnnnnnnnnnnnnnnnnnnnnnnnnnnnnnnnnnnnnnnnnnnnnnnnnnnnnnnnnnnnnnnnnnnnnnnnnnnnnnnnnnnnnnnnnnnnnnnnnnnnnnnnnnnnnnnnnnnnnnnnnnnnnnnnnnnnnnnnnnnnnnnnnnnnnnnnnnnnnnnnnnnnnnnnnnnnnnnnnnnnnnnnnnnnnnnnnnnnnnnnnnnnnnnnnnnnnnnnnnnnnnnnnnnnnnnnnnnnnnnnnnnnnnnnnnnnnnnnnnnnnnnnnnnnnnnnnnnnnnnnnnnnnnnnnnnnnnnnnnnnnnnnnnnnnnnnnnnnnnnnnnnnnnnnnnnnnnnnnnnnnnnnnnnnnnnnnnnnnnnnnnnnnnnnnnnnnnnnnnnnnnnnnnnnnnnnnnnnnnnnnnnnnnnnnnnnnnnnnnnnnnnnnnnnnnnnnnnnnnnnnnnnnnnnnnnnnnnnnnnnnnnnnnnnnnnnnnnnnnnnnnnnnnnnnnnnnnnnnnnnnnnnnnnnnnnnnnnnnnnnnnnnnnnnnnnnnnnnnnnnnnnnnnnnnnnnnnnnnnnnnnnnnnnnnnnnnnnnnnnnnnnnnnnnnnnnnnnnnnnnnnnnnnnnnnnnnnnnnnnnnnnnnnnnnnnnnnnnnnnnnnnnnnnnnnnnnnnnnnnnnnnnnnnnnnnnnnnnnnnnnnnnnnnnnnnnnnnnnnnnnnnnnnnnnnnnnnnnnnnnnnnnnnnnnnnnnnnnnnnnnnnnnnnnnnnnnnnnnnnnnnnnnnnnnnnnnnnnnnnnnnnnnnnnnnnnnnnnnnnnnnnnnnnnnnnnnnnnnnnnnnnnnnnnnnnnnnnnnnnnnnnnnnnnnnnnnnnnnnnnnnnnnnnnnnnnnnnnnnnnnnnnnnnnnnnnnnnnnnnnnnnnnnnnnnnnnnnnnnnnnnnnnnnnnnnnnnnnnnnnnnnnnnnnnnnnnnnnnnnnnnnnnnnnnnnnnnnnnnnnnnnnnnnnnnnnnnnnnnnnnnnnnnnnnnnnnnnnnnnnnnnnnnnnnnnnnnnnnnnnnnnnnnnnnnnnnnnnnnnnnnnnnnnnnnnnnnnnnnnnnnnnnnnnnnnnnnnnnnnnnnnnnnnnnnnnnnnnnnnnnnnnnnnnnnnnnnnnnnnnnnnnnnnnnnnnnnnnnnnnnnnnnnnnnnnnnnnnnnnnnnnnnnnnnnnnnnnnnnnnnnnnnnnnnnnnnnnnnnnnnnnnnnnnnnnnnnnnnnnnnnnnnnnnnnnnnnnnnnnnnnnnnnnnnnnnnnnnnnnnnnnnnnnnnnnnnnnnnnnnnnnnnnnnnnnnnnnnnnnnnnnnnnnnnnnnnnnnnnnnnnnnnnnnnnnnnnnnnnnnnnnnnnnnnnnnnnnnnnnnnnnnnnnnnnnnnnnnnnnnnnnnnnnnnnnnnnnnnnnnnnnnnnnnnnnnnnnnnnnnnnnnnnnnnnnnnnnnnnnnnnnnnnnnnnnnnnnnnnnnnnnnnnnnnnnnnnnnnnnnnnnnnnnnnnnnnnnnnnnnnnnnnnnnnnnnnnnnnnnnnnnnnnnnnnnnnnnnnnnnnnnnnnnnnnnnnnnnnnnnnnnnnnnnnnnnnnnnnnnnnnnnnnnnnnnnnnnnnnnnnnnnnnnnnnnnnnnnnnnnnnnnnnnnnnnnnnnnnnnnnnnnnnnnnnnnnnnnnnnnnnnnnnnnnnnnnnnnnnnnnnnnnnnnnnnnnnnnnnnnnnnnnnnnnnnnnnnnnnnnnnnnnnnnnnnnnnnnnnnnnnnnnnnnnnnnnnnnnnnnnnnnnnnnnnnnnnnnnnnnnnnnnnnnnnnnnnnnnnnnnnnnnnnnnnnnnnnnnnnnnnnnnnnnnnnnnnnnnnnnnnnnnnnnnnnnnnnnnnnnnnnnnnnnnnnnnnnnnnnnnnnnnnnnnnnnnnnnnnnnnnnnnnnnnnnnnnnnnnnnnnnnnnnnnnnnnnnnnnnnnnnnnnnnnnnnnnnnnnnnnnnnnnnnnnnnnnnnnnnnnnnnnnnnnnnnnnnnnnnnnnnnnnnnnnnnnnnnnnnnnnnnnnnnnnnnnnnnnnnnnnnnnnnnnnnnnnnnnnnnnnnnnnnnnnnnnnnnnnnnnnnnnnnnnnnnnnnnnnnnnnnnnnnnnnnnnnnnnnnnnnnnnnnnnnnnnnnnnnnnnnnnnnnnnnnnnnnnnnnnnnnnnnnnnnnnnnnnnnnnnnnnnnnnnnnnnnnnnnnnnnnnnnnnnnnnnnnnnnnnnnnnnnnnnnnnnnnnnnnnnnnnnnnnnnnnnnnnnnnnnnnnnnnnnnnnnnnnnnnnnnnnnnnnnnnnnnnnnnnnnnnnnnnnnnnnnnnnnnnnnnnnnnnnnnnnnnnnnnnnnnnnnnnnnnnnnnnnnnnnnnnnnnnnnnnnnnnnnnnnnnnnnnnnnnnnnnnnnnnnnnnnnnnnnnnnnnnnnnnnnnnnnnnnnnnnnnnnnnnnnnnnnnnnnnnnnnnnnnnnnnnnnnnnnnnnnnnnnnnnnnnnnnnnnnnnnnnnnnnnnnnnnnnnnnnnnnnnnnnnnnnnnnnnnnnnnnnnnnnnnnnnnnnnnnnnnnnnnnnnnnnnnnnnnnnnnnnnnnnnnnnnnnnnnnnnnnnnnnnnnnnnnnnnnnnnnnnnnnnnnnnnnnnnnnnnnnnnnnnnnnnnnnnnnnnnnnnnnnnnnnnnnnnnnnnnnnnnnnnnnnnnnnnnnnnnnnnnnnnnnnnnnnnnnnnnnnnnnnnnnnnnnnnnnnnnnnnnnnnnnnnnnnnnnnnnnnnnnnnnnnnnnnnnnnnnnnnnnnnnnnnnnnnnnnnnnnnnnnnnnnnnnnnnnnnnnnnnnnnnnnnnnnnnnnnnnnnnnnnnnnnnnnnnnnnnnnnnnnnnnnnnnnnnnnnnnnnnnnnnnnnnnnnnnnnnnnnnnnnnnnnnnnnnnnnnnnnnnnnnnnnnnnnnnnnnnnnnnnnnnnnnnnnnnnnnnnnnnnnnnnnnnnnnnnnnnnnnnnnnnnnnnnnnnnnnnnnnnnnnnnnnnnnnnnnnnnnnnnnnnnnnnnnnnnnnnnnnnnnnnnnnnnnnnnnnnnnnnnnnnnnnnnnnnnnnnnnnnnnnnnnnnnnnnnnnnnnnnnnnnnnnnnnnnnnnnnnnnnnnnnnnnnnnnnnnnnnnnnnnnnnnnnnnnnnnnnnnnnnnnnnnnnnnnnnnnnnnnnnnnnnnnnnnnnnnnnnnnnnnnnnnnnnnnnnnnnnnnnnnnnnnnnnnnnnnnnnnnnnnnnnnnnnnnnnnnnnnnnnnnnnnnnnnnnnnnnnnnnnnnnnnnnnnnnnnnnnnnnnnnnnnnnnnnnnnnnnnnnnnnnnnnnnnnnnnnnnnnnnnnnnnnnnnnnnnnnnnnnnnnnnnnnnnnnnnnnnnnnnnnnnnnnnnnnnnnnnnnnnnnnnnnnnnnnnnnnnnnnnnnnnnnnnnnnnnnnnnnnnnnnnnnnnnnnnnnnnnnnnnnnnnnnnnnnnnnnnnnnnnnnnnnnnnnnnnnnnnnnnnnnnnnnnnnnnnnnnnnnnnnnnnnnnnnnnnnnnnnnnnnnnnnnnnnnnnnnnnnnnnnnnnnnnnnnnnnnnnnnnnnnnnnnnnnnnnnnnnnnnnnnnnnnnnnnnnnnnnnnnnnnnnnnnnnnnnnnnnnnnnnnnnnnnnnnnnnnnnnnnnnnnnnnnnnnnnnnnnnnnnnnnnnnnnnnnnnnnnnnnnnnnnnnnnnnnnnnnnnnnnnnnnnnnnnnnnnnnnnnnnnnnnnnnnnnnnnnnnnnnnnnnnnnnnnnnnnnnnnnnnnnnnnnnnnnnnnnnnnnnnnnnnnnnnnnnnnnnnnnnnnnnnnnnnnnnnnnnnnnnnnnnnnnnnnnnnnnnnnnnnnnnnnnnnnnnnnnnnnnnnnnnnnnnnnnnnnnnnnnnnnnnnnnnnnnnnnnnnnnnnnnnnnnnnnnnnnnnnnnnnnnnnnnnnnnnnnnnnnnnnnnnnnnnnnnnnnnnnnnnnnnnnnnnnnnnnnnnnnnnnnnnnnnnnnnnnnnnnnnnnnnnnnnnnnnnnnnnnnnnnnnnnnnnnnnnnnnnnnnnnnnnnnnnnnnnnnnnnnnnnnnnnnnnnnnnnnnnnnnnnnnnnnnnnnnnnnnnnnnnnnnnnnnnnnnnnnnnnnnnnnnnnnnnnnnnnnnnnnnnnnnnnnnnnnnnnnnnnnnnnnnnnnnnnnnnnnnnnnnnnnnnnnnnnnnnnnnnnnnnnnnnnnnnnnnnnnnnnnnnnnnnnnnnnnnnnnnnnnnnnnnnnnnnnnnnnnnnnnnnnnnnnnnnnnnnnnnnnnnnnnnnnnnnnnnnnnnnnnnnnnnnnnnnnnnnnnnnnnnnnnnnnnnnnnnnnnnnnnnnnnnnnnnnnnnnnnnnnnnnnnnnnnnnnnnnnnnnnnnnnnnnnnnnnnnnnnnnnnnnnnnnnnnnnnnnnnnnnnnnnnnnnnnnnnnnnnnnnnnnnnnnnnnnnnnnnnnnnnnnnnnnnnnnnnnnnnnnnnnnnnnnnnnnnnnnnnnnnnnnnnnnnnnnnnnnnnnnnnnnnnnnnnnnnnnnnnnnnnnnnnnnnnnnnnnnnnnnnnnnnnnnnnnnnnnnnnnnnnnnnnnnnnnnnnnnnnnnnnnnnnnnnnnnnnnnnnnnnnnnnnnnnnnnnnnnnnnnnnnnnnnnnnnnnnnnnnnnnnnnnnnnnnnnnnnnnnnnnnnnnnnnnnnnnnnnnnnnnnnnnnnnnnnnnnnnnnnnnnnnnnnnnnnnnnnnnnnnnnnnnnnnnnnnnnnnnnnnnnnnnnnnnnnnnnnnnnnnnnnnnnnnnnnnnnnnnnnnnnnnnnnnnnnnnnnnnnnnnnnnnnnnnnnnnnnnnnnnnnnnnnnnnnnnnnnnnnnnnnnnnnnnnnnnnnnnnnnnnnnnnnnnnnnnnnnnnnnnnnnnnnnnnnnnnnnnnnnnnnnnnnnnnnnnnnnnnnnnnnnnnnnnnnnnnnnnnnnnnnnnnnnnnnnnnnnnnnnnnnnnnnnnnnnnnnnnnnnnnnnnnnnnnnnnnnnnnnnnnnnnnnnnnnnnnnnnnnnnnnnnnnnnnnnnnnnnnnnnnnnnnnnnnnnnnnnnnnnnnnnnnnnnnnnnnnnnnnnnnnnnnnnnnnnnnnnnnnnnnnnnnnnnnnnnnnnnnnnnnnnnnnnnnnnnnnnnnnnnnnnnnnnnnnnnnnnnnnnnnnnnnnnnnnnnnnnnnnnnnnnnnnnnnnnnnnnnnnnnnnnnnnnnnnnnnnnnnnnnnnnnnnnnnnnnnnnnnnnnnnnnnnnnnnnnnnnnnnnnnnnnnnnnnnnnnnnnnnnnnnnnnnnnnnnnnnnnnnnnnnnnnnnnnnnnnnnnnnnnnnnnnnnnnnnnnnnnnnnnnnnnnnnnnnnnnnnnnnnnnnnnnnnnnnnnnnnnnnnnnnnnnnnnnnnnnnnnnnnnnnnnnnnnnnnnnnnnnnnnnnnnnnnnnnnnnnnnnnnnnnnnnnnnnnnnnnnnnnnnnnnnnnnnnnnnnnnnnnnnnnnnnnnnnnnnnnnnnnnnnnnnnnnnnnnnnnnnnnnnnnnnnnnnnnnnnnnnnnnnnnnnnnnnnnnnnnnnnnnnnnnnnnnnnnnnnnnnnnnnnnnnnnnnnnnnnnnnnnnnnnnnnnnnnnnnnnnnnnnnnnnnnnnnnnnnnnnnnnnnnnnnnnnnnnnnnnnnnnnnnnnnnnnnnnnnnnnnnnnnnnnnnnnnnnnnnnnnnnnnnnnnnnnnnnnnnnnnnnnnnnnnnnnnnnnnnnnnnnnnnnnnnnnnnnnnnnnnnnnnnnnnnnnnnnnnnnnnnnnnnnnnnnnnnnnnnnnnnnnnnnnnnnnnnnnnnnnnnnnnnnnnnnnnnnnnnnnnnnnnnnnnnnnnnnnnnnnnnnnnnnnnnnnnnnnnnnnnnnnnnnnnnnnnnnnnnnnnnnnnnnnnnnnnnnnnnnnnnnnnnnnnnnnnnnnnnnnnnnnnnnnnnnnnnnnnnnnnnnnnnnnnnnnnnnnnnnnnnnnnnnnnnnnnnnnnnnnnnnnnnnnnnnnnnnnnnnnnnnnnnnnnnnnnnnnnnnnnnnnnnnnnnnnnnnnnnnnnnnnnnnnnnnnnnnnnnnnnnnnnnnnnnnnnnnnnnnnnnnnnnnnnnnnnnnnnnnnnnnnnnnnnnnnnnnnnnnnnnnnnnnnnnnnnnnnnnnnnnnnnnnnnnnnnnnnnnnnnnnnnnnnnnnnnnnnnnnnnnnnnnnnnnnnnnnnnnnnnnnnnnnnnnnnnnnnnnnnnnnnnnnnnnnnnnnnnnnnnnnnnnnnnnnnnnnnnnnnnnnnnnnnnnnnnnnnnnnnnnnnnnnnnnnnnnnnnnnnnnnnnnnnnnnnnnnnnnnnnnnnnnnnnnnnnnnnnnnnnnnnnnnnnnnnnnnnnnnnnnnnnnnnnnnnnnnnnnnnnnnnnnnnnnnnnnnnnnnnnnnnnnnnnnnnnnnnnnnnnnnnnnnnnnnnnnnnnnnnnnnnnnnnnnnnnnnnnnnnnnnnnnnnnnnnnnnnnnnnnnnnnnnnnnnnnnnnnnnnnnnnnnnnnnnnnnnnnnnnnnnnnnnnnnnnnnnnnnnnnnnnnnnnnnnnnnnnnnnnnnnnnnnnnnnnnnnnnnnnnnnnnnnnnnnnnnnnnnnnnnnnnnnnnnnnnnnnnnnnnnnnnnnnnnnnnnnnnnnnnnnnnnnnnnnnnnnnnnnnnnnnnnnnnnnnnnnnnnnnnnnnnnnnnnnnnnnnnnnnnnnnnnnnnnnnnnnnnnnnnnnnnnnnnnnnnnnnnnnnnnnnnnnnnnnnnnnnnnnnnnnnnnnnnnnnnnnnnnnnnnnnnnnnnnnnnnnnnnnnnnnnnnnnnnnnnnnnnnnnnnnnnnnnnnnnnnnnnnnnnnnnnnnnnnnnnnnnnnnnnnnnnnnnnnnnnnnnnnnnnnnnnnnnnnnnnnnnnnnnnnnnnnnnnnnnnnnnnnnnnnnnnnnnnnnnnnnnnnnnnnnnnnnnnnnnnnnnnnnnnnnnnnnnnnnnnnnnnnnnnnnnnnnnnnnnnnnnnnnnnnnnnnnnnnnnnnnnnnnnnnnnnnnnnnnnnnnnnnnnnnnnnnnnnnnnnnnnnnnnnnnnnnnnnnnnnnnnnnnnnnnnnnnnnnnnnnnnnnnnnnnnnnnnnnnnnnnnnnnnnnnnnnnnnnnnnnnnnnnnnnnnnnnnnnnnnnnnnnnnnnnnnnnnnnnnnnnnnnnnnnnnnnnnnnnnnnnnnnnnnnnnnnnnnnnnnnnnnnnnnnnnnnnnnnnnnnnnnnnnnnnnnnnnnnnnnnnnnnnnnnnnnnnnnnnnnnnnnnnnnnnnnnnnnnnnnnnnnnnnnnnnnnnnnnnnnnnnnnnnnnnnnnnnnnnnnnnnnnnnnnnnnnnnnnnnnnnnnnnnnnnnnnnnnnnnnnnnnnnnnnnnnnnnnnnnnnnnnnnnnnnnnnnnnnnnnnnnnnnnnnnnnnnnnnnnnnnnnnnnnnnnnnnnnnnnnnnnnnnnnnnnnnnnnnnnnnnnnnnnnnnnnnnnnnnnnnnnnnnnnnnnnnnnnnnnnnnnnnnnnnnnnnnnnnnnnnnnnnnnnnnnnnnnnnnnnnnnnnnnnnnnnnnnnnnnnnnnnnnnnnnnnnnnnnnnnnnnnnnnnnnnnnnnnnnnnnnnnnnnnnnnnnnnnnnnnnnnnnnnnnnnnnnnnnnnnnnnnnnnnnnnnnnnnnnnnnnnnnnnnnnnnnnnnnnnnnnnnnnnnnnnnnnnnnnnnnnnnnnnnnnnnnnnnnnnnnnnnnnnnnnnnnnnnnnnnnnnnnnnnnnnnnnnnnnnnnnnnnnnnnnnnnnnnnnnnnnnnnnnnnnnnnnnnnnnnnnnnnnnnnnnnnnnnnnnnnnnnnnnnnnnnnnnnnnnnnnnnnnnnnnnnnnnnnnnnnnnnnnnnnnnnnnnnnnnnnnnnnnnnnnnnnnnnnnnnnnnnnnnnnnnnnnnnnnnnnnnnnnnnnnnnnnnnnnnnnnnnnnnnnnnnnnnnnnnnnnnnnnnnnnnnnnnnnnnnnnnnnnnnnnnnnnnnnnnnnnnnnnnnnnnnnnnnnnnnnnnnnnnnnnnnnnnnnnnnnnnnnnnnnnnnnnnnnnnnnnnnnnnnnnnnnnnnnnnnnnnnnnnnnnnnnnnnnnnnnnnnnnnnnnnnnnnnnnnnnnnnnnnnnnnnnnnnnnnnnnnnnnnnnnnnnnnnnnnnnnnnnnnnnnnnnnnnnnnnnnnnnnnnnnnnnnnnnnnnnnnnnnnnnnnnnnnnnnnnnnnnnnnnnnnnnnnnnnnnnnnnnnnnnnnnnnnnnnnnnnnnnnnnnnnnnnnnnnnnnnnnnnnnnnnnnnnnnnnnnnnnnnnnnnnnnnnnnnnnnnnnnnnnnnnnnnnnnnnnnnnnnnnnnnnnnnnnnnnnnnnnnnnnnnnnnnnnnnnnnnnnnnnnnnnnnnnnnnnnnnnnnnnnnnnnnnnnnnnnnnnnnnnnnnnnnnnnnnnnnnnnnnnnnnnnnnnnnnnnnnnnnnnnnnnnnnnnnnnnnnnnnnnnnnnnnnnnnnnnnnnnnnnnnnnnnnnnnnnnnnnnnnnnnnnnnnnnnnnnnnnnnnnnnnnnnnnnnnnnnnnnnnnnnnnnnnnnnnnnnnnnnnnnnnnnnnnnnnnnnnnnnnnnnnnnnnnnnnnnnnnnnnnnnnnnnnnnnnnnnnnnnnnnnnnnnnnnnnnnnnnnnnnnnnnnnnnnnnnnnnnnnnnnnnnnnnnnnnnnnnnnnnnnnnnnnnnnnnnnnnnnnnnnnnnnnnnnnnnnnnnnnnnnnnnnnnnnnnnnnnnnnnnnnnnnnnnnnnnnnnnnnnnnnnnnnnnnnnnnnnnnnnnnnnnnnnnnnnnnnnnnnnnnnnnnnnnnnnnnnnnnnnnnnnnnnnnnnnnnnnnnnnnnnnnnnnnnnnnnnnnnnnnnnnnnnnnnnnnnnnnnnnnnnnnnnnnnnnnnnnnnnnnnnnnnnnnnnnnnnnnnnnnnnnnnnnnnnnnnnnnnnnnnnnnnnnnnnnnnnnnnnnnnnnnnnnnnnnnnnnnnnnnnnnnnnnnnnnnnnnnnnnnnnnnnnnnnnnnnnnnnnnnnnnnnnnnnnnnnnnnnnnnnnnnnnnnnnnnnnnnnnnnnnnnnnnnnnnnnnnnnnnnnnnnnnnnnnnnnnnnnnnnnnnnnnnnnnnnnnnnnnnnnnnnnnnnnnnnnnnnnnnnnnnnnnnnnnnnnnnnnnnnnnnnnnnnnnnnnnnnnnnnnnnnnnnnnnnnnnnnnnnnnnnnnnnnnnnnnnnnnnnnnnnnnnnnnnnnnnnnnnnnnnnnnnnnnnnnnnnnnnnnnnnnnnnnnnnnnnnnnnnnnnnnnnnnnnnnnnnnnnnnnnnnnnnnnnnnnnnnnnnnnnnnnnnnnnnnnnnnnnnnnnnnnnnnnnnnnnnnnnnnnnnnnnnnnnnnnnnnnnnnnnnnnnnnnnnnnnnnnnnnnnnnnnnnnnnnnnnnnnnnnnnnnnnnnnnnnnnnnnnnnnnnnnnnnnnnnnnnnnnnnnnnnnnnnnnnnnnnnnnnnnnnnnnnnnnnnnnnnnnnnnnnnnnnnnnnnnnnnnnnnnnnnnnnnnnnnnnnnnnnnnnnnnnnnnnnnnnnnnnnnnnnnnnnnnnnnnnnnnnnnnnnnnnnnnnnnnnnnnnnnnnnnnnnnnnnnnnnnnnnnnnnnnnnnnnnnnnnnnnnnnnnnnnnnnnnnnnnnnnnnnnnnnnnnnnnnnnnnnnnnnnnnnnnnnnnnnnnnnnnnnnnnnnnnnnnnnnnnnnnnnnnnnnnnnnnnnnnnnnnnnnnnnnnnnnnnnnnnnnnnnnnnnnnnnnnnnnnnnnnnnnnnnnnnnnnnnnnnnnnnnnnnnnnnnnnnnnnnnnnnnnnnnnnnnnnnnnnnnnnnnnnnnnnnnnnnnnnnnnnnnnnnnnnnnnnnnnnnnnnnnnnnnnnnnnnnnnnnnnnnnnnnnnnnnnnnnnnnnnnnnnnnnnnnnnnnnnnnnnnnnnnnnnnnnnnnnnnnnnnnnnnnnnnnnnnnnnnnnnnnnnnnnnnnnnnnnnnnnnnnnnnnnnnnnnnnnnnnnnnnnnnnnnnnnnnnnnnnnnnnnnnnnnnnnnnnnnnnnnnnnnnnnnnnnnnnnnnnnnnnnnnnnnnnnnnnnnnnnnnnnnnnnnnnnnnnnnnnnnnnnnnnnnnnnnnnnnnnnnnnnnnnnnnnnnnnnnnnnnnnnnnnnnnnnnnnnnnnnnnnnnnnnnnnnnnnnnnnnnnnnnnnnnnnnnnnnnnnnnnnnnnnnnnnnnnnnnnnnnnnnnnnnnnnnnnnnnnnnnnnnnnnnnnnnnnnnnnnnnnnnnnnnnnnnnnnnnnnnnnnnnnnnnnnnnnnnnnnnnnnnnnnnnnnnnnnnnnnnnnnnnnnnnnnnnnnnnnnnnnnnnnnnnnnnnnnnnnnnnnnnnnnnnnnnnnnnnnnnnnnnnnnnnnnnnnnnnnnnnnnnnnnnnnnnnnnnnnnnnnnnnnnnnnnnnnnnnnnnnnnnnnnnnnnnnnnnnnnnnnnnnnnnnnnnnnnnnnnnnnnnnnnnnnnnnnnnnnnnnnnnnnnnnnnnnnnnnnnnnnnnnnnnnnnnnnnnnnnnnnnnnnnnnnnnnnnnnnnnnnnnnnnnnnnnnnnnnnnnnnnnnnnnnnnnnnnnnnnnnnnnnnnnnnnnnnnnnnnnnnnnnnnnnnnnnnnnnnnnnnnnnnnnnnnnnnnnnnnnnnnnnnnnnnnnnnnnnnnnnnnnnnnnnnnnnnnnnnnnnnnnnnnnnnnnnnnnnnnnnnnnnnnnnnnnnnnnnnnnnnnnnnnnnnnnnnnnnnnnnnnnnnnnnnnnnnnnnnnnnnnnnnnnnnnnnnnnnnnnnnnnnnnnnnnnnnnnnnnnnnnnnnnnnnnnnnnnnnnnnnnnnnnnnnnnnnnnnnnnnnnnnnnnnnnnnnnnnnnnnnnnnnnnnnnnnnnnnnnnnnnnnnnnnnnnnnnnnnnnnnnnnnnnnnnnnnnnnnnnnnnnnnnnnnnnnnnnnnnnnnnnnnnnnnnnnnnnnnnnnnnnnnnnnnnnnnnnnnnnnnnnnnnnnnnnnnnnnnnnnnnnnnnnnnnnnnnnnnnnnnnnnnnnnnnnnnnnnnnnnnnnnnnnnnnnnnnnnnnnnnnnnnnnnnnnnnnnnnnnnnnnnnnnnnnnnnnnnnnnnnnnnnnnnnnnnnnnnnnnnnnnnnnnnnnnnnnnnnnnnnnnnnnnnnnnnnnnnnnnnnnnnnnnnnnnnnnnnnnnnnnnnnnnnnnnnnnnnnnnnnnnnnnnnnnnnnnnnnnnnnnnnnnnnnnnnnnnnnnnnnnnnnnnnnnnnnnnnnnnnnnnnnnnnnnnnnnnnnnnnnnnnnnnnnnnnnnnnnnnnnnnnnnnnnnnnnnnnnnnnnnnnnnnnnnnnnnnnnnnnnnnnnnnnnnnnnnnnnnnnnnnnnnnnnnnnnnnnnnnnnnnnnnnnnnnnnnnnnnnnnnnnnnnnnnnnnnnnnnnnnnnnnnnnnnnnnnnnnnnnnnnnnnnnnnnnnnnnnnnnnnnnnnnnnnnnnnnnnnnnnnnnnnnnnnnnnnnnnnnnnnnnnnnnnnnnnnnnnnnnnnnnnnnnnnnnnnnnnnnnnnnnnnnnnnnnnnnnnnnnnnnnnnnnnnnnnnnnnnnnnnnnnnnnnnnnnnnnnnnnnnnnnnnnnnnnnnnnnnnnnnnnnnnnnnnnnnnnnnnnnnnnnnnnnnnnnnnnnnnnnnnnnnnnnnnnnnnnnnnnnnnnnnnnnnnnnnnnnnnnnnnnnnnnnnnnnnnnnnnnnnnnnnnnnnnnnnnnnnnnnnnnnnnnnnnnnnnnnnnnnnnnnnnnnnnnnnnnnnnnnnnnnnnnnnnnnnnnnnnnnnnnnnnnnnnnnnnnnnnnnnnnnnnnnnnnnnnnnnnnnnnnnnnnnnnnnnnnnnnnnnnnnnnnnnnnnnnnnnnnnnnnnnnnnnnnnnnnnnnnnnnnnnnnnnnnnnnnnnnnnnnnnnnnnnnnnnnnnnnnnnnnnnnnnnnnnnnnnnnnnnnnnnnnnnnnnnnnnnnnnnnnnnnnnnnnnnnnnnnnnnnnnnnnnnnnnnnnnnnnnnnnnnnnnnnnnnnnnnnnnnnnnnnnnnnnnnnnnnnnnnnnnnnnnnnnnnnnnnnnnnnnnnnnnnnnnnnnnnnnnnnnnnnnnnnnnnnnnnnnnnnnnnnnnnnnnnnnnnnnnnnnnnnnnnnnnnnnnnnnnnnnnnnnnnnnnnnnnnnnnnnnnnnnnnnnnnnnnnnnnnnnnnnnnnnnnnnnnnnnnnnnnnnnnnnnnnnnnnnnnnnnnnnnnnnnnnnnnnnnnnnnnnnnnnnnnnnnnnnnnnnnnnnnnnnnnnnnnnnnnnnnnnnnnnnnnnnnnnnnnnnnnnnnnnnnnnnnnnnnnnnnnnnnnnnnnnnnnnnnnnnnnnnnnnnnnnnnnnnnnnnnnnnnnnnnnnnnnnnnnnnnnnnnnnnnnnnnnnnnnnnnnnnnnnnnnnnnnnnnnnnnnnnnnnnnnnnnnnnnnnnnnnnnnnnnnnnnnnnnnnnnnnnnnnnnnnnnnnnnnnnnnnnnnnnnnnnnnnnnnnnnnnnnnnnnnnnnnnnnnnnnnnnnnnnnnnnnnnnnnnnnnnnnnnnnnnnnnnnnnnnnnnnnnnnnnnnnnnnnnnnnnnnnnnnnnnnnnnnnnnnnnnnnnnnnnnnnnnnnnnnnnnnnnnnnnnnnnnnnnnnnnnnnnnnnnnnnnnnnnnnnnnnnnnnnnnnnnnnnnnnnnnnnnnnnnnnnnnnnnnnnnnnnnnnnnnnnnnnnnnnnnnnnnnnnnnnnnnnnnnnnnnnnnnnnnnnnnnnnnnnnnnnnnnnnnnnnnnnnnnnnnnnnnnnnnnnnnnnnnnnnnnnnnnnnnnnnnnnnnnnnnnnnnnnnnnnnnnnnnnnnnnnnnnnnnnnnnnnnnnnnnnnnnnnnnnnnnnnnnnnnnnnnnnnnnnnnnnnnnnnnnnnnnnnnnnnnnnnnnnnnnnnnnnnnnnnnnnnnnnnnnnnnnnnnnnnnnnnnnnnnnnnnnnnnnnnnnnnnnnnnnnnnnnnnnnnnnnnnnnnnnnnnnnnnnnnnnnnnnnnnnnnnnnnnnnnnnnnnnnnnnnnnnnnnnnnnnnnnnnnnnnnnnnnnnnnnnnnnnnnnnnnnnnnnnnnnnnnnnnnnnnnnnnnnnnnnnnnnnnnnnnnnnnnnnnnnnnnnnnnnnnnnnnnnnnnnnnnnnnnnnnnnnnnnnnnnnnnnnnnnnnnnnnnnnnnnnnnnnnnnnnnnnnnnnnnnnnnnnnnnnnnnnnnnnnnnnnnnnnnnnnnnnnnnnnnnnnnnnnnnnnnnnnnnnnnnnnnnnnnnnnnnnnnnnnnnnnnnnnnnnnnnnnnnnnnnnnnnnnnnnnnnnnnnnnnnnnnnnnnnnnnnnnnnnnnnnnnnnnnnnnnnnnnnnnnnnnnnnnnnnnnnnnnnnnnnnnnnnnnnnnnnnnnnnnnnnnnnnnnnnnnnnnnnnnnnnnnnnnnnnnnnnnnnnnnnnnnnnnnnnnnnnnnnnnnnnnnnnnnnnnnnnnnnnnnnnnnnnnnnnnnnnnnnnnnnnnnnnnnnnnnnnnnnnnnnnnnnnnnnnnnnnnnnnnnnnnnnnnnnnnnnnnnnnnnnnnnnnnnnnnnnnnnnnnnnnnnnnnnnnnnnnnnnnnnnnnnnnnnnnnnnnnnnnnnnnnnnnnnnnnnnnnnnnnnnnnnnnnnnnnnnnnnnnnnnnnnnnnnnnnnnnnnnnnnnnnnnnnnnnnnnnnnnnnnnnnnnnnnnnnnnnnnnnnnnnnnnnnnnnnnnnnnnnnnnnnnnnnnnnnnnnnnnnnnnnnnnnnnnnnnnnnnnnnnnnnnnnnnnnnnnnnnnnnnnnnnnnnnnnnnnnnnnnnnnnnnnnnnnnnnnnnnnnnnnnnnnnnnnnnnnnnnnnnnnnnnnnnnnnnnnnnnnnnnnnnnnnnnnnnnnnnnnnnnnnnnnnnnnnnnnnnnnnnnnnnnnnnnnnnnnnnnnnnnnnnnnnnnnnnnnnnnnnnnnnnnnnnnnnnnnnnnnnnnnnnnnnnnnnnnnnnnnnnnnnnnnnnnnnnnnnnnnnnnnnnnnnnnnnnnnnnnnnnnnnnnnnnnnnnnnnnnnnnnnnnnnnnnnnnnnnnnnnnnnnnnnnnnnnnnnnnnnnnnnnnnnnnnnnnnnnnnnnnnnnnnnnnnnnnnnnnnnnnnnnnnnnnnnnnnnnnnnnnnnnnnnnnnnnnnnnnnnnnnnnnnnnnnnnnnnnnnnnnnnnnnnnnnnnnnnnnnnnnnnnnnnnnnnnnnnnnnnnnnnnnnnnnnnnnnnnnnnnnnnnnnnnnnnnnnnnnnnnnnnnnnnnnnnnnnnnnnnnnnnnnnnnnnnnnnnnnnnnnnnnnnnnnnnnnnnnnnnnnnnnnnnnnnnnnnnnnnnnnnnnnnnnnnnnnnnnnnnnnnnnnnnnnnnnnnnnnnnnnnnnnnnnnnnnnnnnnnnnnnnnnnnnnnnnnnnnnnnnnnnnnnnnnnnnnnnnnnnnnnnnnnnnnnnnnnnnnnnnnnnnnnnnnnnnnnnnnnnnnnnnnnnnnnnnnnnnnnnnnnnnnnnnnnnnnnnnnnnnnnnnnnnnnnnnnnnnnnnnnnnnnnnnnnnnnnnnnnnnnnnnnnnnnnnnnnnnnnnnnnnnnnnnnnnnnnnnnnnnnnnnnnnnnnnnnnnnnnnnnnnnnnnnnnnnnnnnnnnnnnnnnnnnnnnnnnnnnnnnnnnnnnnnnnnnnnnnnnnnnnnnnnnnnnnnnnnnnnnnnnnnnnnnnnnnnnnnnnnnnnnnnnnnnnnnnnnnnnnnnnnnnnnnnnnnnnnnnnnnnnnnnnnnnnnnnnnnnnnnnnnnnnnnnnnnnnnnnnnnnnnnnnnnnnnnnnnnnnnnnnnnnnnnnnnnnnnnnnnnnnnnnnnnnnnnnnnnnnnnnnnnnnnnnnnnnnnnnnnnnnnnnnnnnnnnnnnnnnnnnnnnnnnnnnnnnnnnnnnnnnnnnnnnnnnnnnnnnnnnnnnnnnnnnnnnnnnnnnnnnnnnnnnnnnnnnnnnnnnnnnnnnnnnnnnnnnnnnnnnnnnnnnnnnnnnnnnnnnnnnnnnnnnnnnnnnnnnnnnnnnnnnnnnnnnnnnnnnnnnnnnnnnnnnnnnnnnnnnnnnnnnnnnnnnnnnnnnnnnnnnnnnnnnnnnnnnnnnnnnnnnnnnnnnnnnnnnnnnnnnnnnnnnnnnnnnnnnnnnnnnnnnnnnnnnnnnnnnnnnnnnnnnnnnnnnnnnnnnnnnnnnnnnnnnnnnnnnnnnnnnnnnnnnnnnnnnnnnnnnnnnnnnnnnnnnnnnnnnnnnnnnnnnnnnnnnnnnnnnnnnnnnnnnnnnnnnnnnnnnnnnnnnnnnnnnnnnnnnnnnnnnnnnnnnnnnnnnnnnnnnnnnnnnnnnnnnnnnnnnnnnnnnnnnnnnnnnnnnnnnnnnnnnnnnnnnnnnnnnnnnnnnnnnnnnnnnnnnnnnnnnnnnnnnnnnnnnnnnnnnnnnnnnnnnnnnnnnnnnnnnnnnnnnnnnnnnnnnnnnnnnnnnnnnnnnnnnnnnnnnnnnnnnnnnnnnnnnnnnnnnnnnnnnnnnnnnnnnnnnnnnnnnnnnnnnnnnnnnnnnnnnnnnnnnnnnnnnnnnnnnnnnnnnnnnnnnnnnnnnnnnnnnnnnnnnnnnnnnnnnnnnnnnnnnnnnnnnnnnnnnnnnnnnnnnnnnnnnnnnnnnnnnnnnnnnnnnnnnnnnnnnnnnnnnnnnnnnnnnnnnnnnnnnnnnnnnnnnnnnnnnnnnnnnnnnnnnnnnnnnnnnnnnnnnnnnnnnnnnnnnnnnnnnnnnnnnnnnnnnnnnnnnnnnnnnnnnnnnnnnnnnnnnnnnnnnnnnnnnnnnnnnnnnnnnnnnnnnnnnnnnnnnnnnnnnnnnnnnnnnnnnnnnnnnnnnnnnnnnnnnnnnnnnnnnnnnnnnnnnnnnnnnnnnnnnnnnnnnnnnnnnnnnnnnnnnnnnnnnnnnnnnnnnnnnnnnnnnnnnnnnnnnnnnnnnnnnnnnnnnnnnnnnnnnnnnnnnnnnnnnnnnnnnnnnnnnnnnnnnnnnnnnnnnnnnnnnnnnnnnnnnnnnnnnnnnnnnnnnnnnnnnnnnnnnnnnnnnnnnnnnnnnnnnnnnnnnnnnnnnnnnnnnnnnnnnnnnnnnnnnnnnnnnnnnnnnnnnnnnnnnnnnnnnnnnnnnnnnnnnnnnnnnnnnnnnnnnnnnnnnnnnnnnnnnnnnnnnnnnnnnnnnnnnnnnnnnnnnnnnnnnnnnnnnnnnnnnnnnnnnnnnnnnnnnnnnnnnnnnnnnnnnnnnnnnnnnnnnnnnnnnnnnnnnnnnnnnnnnnnnnnnnnnnnnnnnnnnnnnnnnnnnnnnnnnnnnnnnnnnnnnnnnnnnnnnnnnnnnnnnnnnnnnnnnnnnnnnnnnnnnnnnnnnnnnnnnnnnnnnnnnnnnnnnnnnnnnnnnnnnnnnnnnnnnnnnnnnnnnnnnnnnnnnnnnnnnnnnnnnnnnnnnnnnnnnnnnnnnnnnnnnnnnnnnnnnnnnnnnnnnnnnnnnnnnnnnnnnnnnnnnnnnnnnnnnnnnnnnnnnnnnnnnnnnnnnnnnnnnnnnnnnnnnnnnnnnnnnnnnnnnnnnnnnnnnnnnnnnnnnnnnnnnnnnnnnnnnnnnnnnnnnnnnnnnnnnnnnnnnnnnnnnnnnnnnnnnnnnnnnnnnnnnnnnnnnnnnnnnnnnnnnnnnnnnnnnnnnnnnnnnnnnnnnnnnnnnnnnnnnnnnnnnnnnnnnnnnnnnnnnnnnnnnnnnnnnnnnnnnnnnnnnnnnnnnnnnnnnnnnnnnnnnnnnnnnnnnnnnnnnnnnnnnnnnnnnnnnnnnnnnnnnnnnnnnnnnnnnnnnnnnnnnnnnnnnnnnnnnnnnnnnnnnnnnnnnnnnnnnnnnnnnnnnnnnnnnnnnnnnnnnnnnnnnnnnnnnnnnnnnnnnnnnnnnnnnnnnnnnnnnnnnnnnnnnnnnnnnnnnnnnnnnnnnnnnnnnnnnnnnnnnnnnnnnnnnnnnnnnnnnnnnnnnnnnnnnnnnnnnnnnnnnnnnnnnnnnnnnnnnnnnnnnnnnnnnnnnnnnnnnnnnnnnnnnnnnnnnnnnnnnnnnnnnnnnnnnnnnnnnnnnnnnnnnnnnnnnnnnnnnnnnnnnnnnnnnnnnnnnnnnnnnnnnnnnnnnnnnnnnnnnnnnnnnnnnnnnnnnnnnnnnnnnnnnnnnnnnnnnnnnnnnnnnnnnnnnnnnnnnnnnnnnnnnnnnnnnnnnnnnnnnnnnnnnnnnnnnnnnnnnnnnnnnnnnnnnnnnnnnnnnnnnnnnnnnnnnnnnnnnnnnnnnnnnnnnnnnnnnnnnnnnnnnnnnnnnnnnnnnnnnnnnnnnnnnnnnnnnnnnnnnnnnnnnnnnnnnnnnnnnnnnnnnnnnnnnnnnnnnnnnnnnnnnnnnnnnnnnnnnnnnnnnnnnnnnnnnnnnnnnnnnnnnnnnnnnnnnnnnnnnnnnnnnnnnnnnnnnnnnnnnnnnnnnnnnnnnnnnnnnnnnnnnnnnnnnnnnnnnnnnnnnnnnnnnnnnnnnnnnnnnnnnnnnnnnnnnnnnnnnnnnnnnnnnnnnnnnnnnnnnnnnnnnnnnnnnnnnnnnnnnnnnnnnnnnnnnnnnnnnnnnnnnnnnnnnnnnnnnnnnnnnnnnnnnnnnnnnnnnnnnnnnnnnnnnnnnnnnnnnnnnnnnnnnnnnnnnnnnnnnnnnnnnnnnnnnnnnnnnnnnnnnnnnnnnnnnnnnnnnnnnnnnnnnnnnnnnnnnnnnnnnnnnnnnnnnnnnnnnnnnnnnnnnnnnnnnnnnnnnnnnnnnnnnnnnnnnnnnnnnnnnnnnnnnnnnnnnnnnnnnnnnnnnnnnnnnnnnnnnnnnnnnnnnnnnnnnnnnnnnnnnnnnnnnnnnnnnnnnnnnnnnnnnnnnnnnnnnnnnnnnnnnnnnnnnnnnnnnnnnnnnnnnnnnnnnnnnnnnnnnnnnnnnnnnnnnnnnnnnnnnnnnnnnnnnnnnnnnnnnnnnnnnnnnnnnnnnnnnnnnnnnnnnnnnnnnnnnnnnnnnnnnnnnnnnnnnnnnnnnnnnnnnnnnnnnnnnnnnnnnnnnnnnnnnnnnnnnnnnnnnnnnnnnnnnnnnnnnnnnnnnnnnnnnnnnnnnnnnnnnnnnnnnnnnnnnnnnnnnnnnnnnnnnnnnnnnnnnnnnnnnnnnnnnnnnnnnnnnnnnnnnnnnnnnnnnnnnnnnnnnnnnnnnnnnnnnnnnnnnnnnnnnnnnnnnnnnnnnnnnnnnnnnnnnnnnnnnnnnnnnnnnnnnnnnnnnnnnnnnnnnnnnnnnnnnnnnnnnnnnnnnnnnnnnnnnnnnnnnnnnnnnnnnnnnnnnnnnnnnnnnnnnnnnnnnnnnnnnnnnnnnnnnnnnnnnnnnnnnnnnnnnnnnnnnnnnnnnnnnnnnnnnnnnnnnnnnnnnnnnnnnnnnnnnnnnnnnnnnnnnnnnnnnnnnnnnnnnnnnnnnnnnnnnnnnnnnnnnnnnnnnnnnnnnnnnnnnnnnnnnnnnnnnnnnnnnnnnnnnnnnnnnnnnnnnnnnnnnnnnnnnnnnnnnnnnnnnnnnnnnnnnnnnnnnnnnnnnnnnnnnnnnnnnnnnnnnnnnnnnnnnnnnnnnnnnnnnnnnnnnnnnnnnnnnnnnnnnnnnnnnnnnnnnnnnnnnnnnnnnnnnnnnnnnnnnnnnnnnnnnnnnnnnnnnnnnnnnnnnnnnnnnnnnnnnnnnnnnnnnnnnnnnnnnnnnnnnnnnnnnnnnnnnnnnnnnnnnnnnnnnnnnnnnnnnnnnnnnnnnnnnnnnnnnnnnnnnnnnnnnnnnnnnnnnnnnnnnnnnnnnnnnnnnnnnnnnnnnnnnnnnnnnnnnnnnnnnnnnnnnnnnnnnnnnnnnnnnnnnnnnnnnnnnnnnnnnnnnnnnnnnnnnnnnnnnnnnnnnnnnnnnnnnnnnnnnnnnnnnnnnnnnnnnnnnnnnnnnnnnnnnnnnnnnnnnnnnnnnnnnnnnnnnnnnnnnnnnnnnnnnnnnnnnnnnnnnnnnnnnnnnnnnnnnnnnnnnnnnnnnnnnnnnnnnnnnnnnnnnnnnnnnnnnnnnnnnnnnnnnnnnnnnnnnnnnnnnnnnnnnnnnnnnnnnnnnnnnnnnnnnnnnnnnnnnnnnnnnnnnnnnnnnnnnnnnnnnnnnnnnnnnnnnnnnnnnnnnnnnnnnnnnnnnnnnnnnnnnnnnnnnnnnnnnnnnnnnnnnnnnnnnnnnnnnnnnnnnnnnnnnnnnnnnnnnnnnnnnnnnnnnnnnnnnnnnnnnnnnnnnnnnnnnnnnnnnnnnnnnnnnnnnnnnnnnnnnnnnnnnnnnnnnnnnnnnnnnnnnnnnnnnnnnnnnnnnnnnnnnnnnnnnnnnnnnnnnnnnnnnnnnnnnnnnnnnnnnnnnnnnnnnnnnnnnnnnnnnnnnnnnnnnnnnnnnnnnnnnnnnnnnnnnnnnnnnnnnnnnnnnnnnnnnnnnnnnnnnnnnnnnnnnnnnnnnnnnnnnnnnnnnnnnnnnnnnnnnnnnnnnnnnnnnnnnnnnnnnnnnnnnnnnnnnnnnnnnnnnnnnnnnnnnnnnnnnnnnnnnnnnnnnnnnnnnnnnnnnnnnnnnnnnnnnnnnnnnnnnnnnnnnnnnnnnnnnnnnnnnnnnnnnnnnnnnnnnnnnnnnnnnnnnnnnnnnnnnnnnnnnnnnnnnnnnnnnnnnnnnnnnnnnnnnnnnnnnnnnnnnnnnnnnnnnnnnnnnnnnnnnnnnnnnnnnnnnnnnnnnnnnnnnnnnnnnnnnnnnnnnnnnnnnnnnnnnnnnnnnnnnnnnnnnnnnnnnnnnnnnnnnnnnnnnnnnnnnnnnnnnnnnnnnnnnnnnnnnnnnnnnnnnnnnnnnnnnnnnnnnnnnnnnnnnnnnnnnnnnnnnnnnnnnnnnnnnnnnnnnnnnnnnnnnnnnnnnnnnnnnnnnnnnnnnnnnnnnnnnnnnnnnnnnnnnnnnnnnnnnnnnnnnnnnnnnnnnnnnnnnnnnnnnnnnnnnnnnnnnnnnnnnnnnnnnnnnnnnnnnnnnnnnnnnnnnnnnnnnnnnnnnnnnnnnnnnnnnnnnnnnnnnnnnnnnnnnnnnnnnnnnnnnnnnnnnnnnnnnnnnnnnnnnnnnnnnnnnnnnnnnnnnnnnnnnnnnnnnnnnnnnnnnnnnnnnnnnnnnnnnnnnnnnnnnnnnnnnnnnnnnnnnnnnnnnnnnnnnnnnnnnnnnnnnnnnnnnnnnnnnnnnnnnnnnnnnnnnnnnnnnnnnnnnnnnnnnnnnnnnnnnnnnnnnnnnnnnnnnnnnnnnnnnnnnnnnnnnnnnnnnnnnnnnnnnnnnnnnnnnnnnnnnnnnnnnnnnnnnnnnnnnnnnnnnnnnnnnnnnnnnnnnnnnnnnnnnnnnnnnnnnnnnnnnnnnnnnnnnnnnnnnnnnnnnnnnnnnnnnnnnnnnnnnnnnnnnnnnnnnnnnnnnnnnnnnnnnnnnnnnnnnnnnnnnnnnnnnnnnnnnnnnnnnnnnnnnnnnnnnnnnnnnnnnnnnnnnnnnnnnnnnnnnnnnnnnnnnnnnnnnnnnnnnnnnnnnnnnnnnnnnnnnnnnnnnnnnnnnnnnnnnnnnnnnnnnnnnnnnnnnnnnnnnnnnnnnnnnnnnnnnnnnnnnnnnnnnnnnnnnnnnnnnnnnnnnnnnnnnnnnnnnnnnnnnnnnnnnnnnnnnnnnnnnnnnnnnnnnnnnnnnnnnnnnnnnnnnnnnnnnnnnnnnnnnnnnnnnnnnnnnnnnnnnnnnnnnnnnnnnnnnnnnnnnnnnnnnnnnnnnnnnnnnnnnnnnnnnnnnnnnnnnnnnnnnnnnnnnnnnnnnnnnnnnnnnnnnnnnnnnnnnnnnnnnnnnnnnnnnnnnnnnnnnnnnnnnnnnnnnnnnnnnnnnnnnnnnnnnnnnnnnnnnnnnnnnnnnnnnnnnnnnnnnnnnnnnnnnnnnnnnnnnnnnnnnnnnnnnnnnnnnnnnnnnnnnnnnnnnnnnnnnnnnnnnnnnnnnnnnnnnnnnnnnnnnnnnnnnnnnnnnnnnnnnnnnnnnnnnnnnnnnnnnnnnnnnnnnnnnnnnnnnnnnnnnnnnnnnnnnnnnnnnnnnnnnnnnnnnnnnnnnnnnnnnnnnnnnnnnnnnnnnnnnnnnnnnnnnnnnnnnnnnnnnnnnnnnnnnnnnnnnnnnnnnnnnnnnnnnnnnnnnnnnnnnnnnnnnnnnnnnnnnnnnnnnnnnnnnnnnnnnnnnnnnnnnnnnnnnnnnnnnnnnnnnnnnnnnnnnnnnnnnnnnnnnnnnnnnnnnnnnnnnnnnnnnnnnnnnnnnnnnnnnnnnnnnnnnnnnnnnnnnnnnnnnnnnnnnnnnnnnnnnnnnnnnnnnnnnnnnnnnnnnnnnnnnnnnnnnnnnnnnnnnnnnnnnnnnnnnnnnnnnnnnnnnnnnnnnnnnnnnnnnnnnnnnnnnnnnnnnnnnnnnnnnnnnnnnnnnnnnnnnnnnnnnnnnnnnnnnnnnnnnnnnnnnnnnnnnnnnnnnnnnnnnnnnnnnnnnnnnnnnnnnnnnnnnnnnnnnnnnnnnnnnnnnnnnnnnnnnnnnnnnnnnnnnnnnnnnnnnnnnnnnnnnnnnnnnnnnnnnnnnnnnnnnnnnnnnnnnnnnnnnnnnnnnnnnnnnnnnnnnnnnnnnnnnnnnnnnnnnnnnnnnnnnnnnnnnnnnnnnnnnnnnnnnnnnnnnnnnnnnnnnnnnnnnnnnnnnnnnnnnnnnnnnnnnnnnnnnnnnnnnnnnnnnnnnnnnnnnnnnnnnnnnnnnnnnnnnnnnnnnnnnnnnnnnnnnnnnnnnnnnnnnnnnnnnnnnnnnnnnnnnnnnnnnnnnnnnnnnnnnnnnnnnnnnnnnnnnnnnnnnnnnnnnnnnnnnnnnnnnnnnnnnnnnnnnnnnnnnnnnnnnnnnnnnnnnnnnnnnnnnnnnnnnnnnnnnnnnnnnnnnnnnnnnnnnnnnnnnnnnnnnnnnnnnnnnnnnnnnnnnnnnnnnnnnnnnnnnnnnnnnnnnnnnnnnnnnnnnnnnnnnnnnnnnnnnnnnnnnnnnnnnnnnnnnnnnnnnnnnnnnnnnnnnnnnnnnnnnnnnnnnnnnnnnnnnnnnnnnnnnnnnnnnnnnnnnnnnnnnnnnnnnnnnnnnnnnnnnnnnnnnnnnnnnnnnnnnnnnnnnnnnnnnnnnnnnnnnnnnnnnnnnnnnnnnnnnnnnnnnnnnnnnnnnnnnnnnnnnnnnnnnnnnnnnnnnnnnnnnnnnnnnnnnnnnnnnnnnnnnnnnnnnnnnnnnnnnnnnnnnnnnnnnnnnnnnnnnnnnnnnnnnnnnnnnnnnnnnnnnnnnnnnnnnnnnnnnnnnnnnnnnnnnnnnnnnnnnnnnnnnnnnnnnnnnnnnnnnnnnnnnnnnnnnnnnnnnnnnnnnnnnnnnnnnnnnnnnnnnnnnnnnnnnnnnnnnnnnnnnnnnnnnnnnnnnnnnnnnnnnnnnnnnnnnnnnnnnnnnnnnnnnnnnnnnnnnnnnnnnnnnnnnnnnnnnnnnnnnnnnnnnnnnnnnnnnnnnnnnnnnnnnnnnnnnnnnnnnnnnnnnnnnnnnnnnnnnnnnnnnnnnnnnnnnnnnnnnnnnnnnnnnnnnnnnnnnnnnnnnnnnnnnnnnnnnnnnnnnnnnnnnnnnnnnnnnnnnnnnnnnnnnnnnnnnnnnnnnnnnnnnnnnnnnnnnnnnnnnnnnnnnnnnnnnnnnnnnnnnnnnnnnnnnnnnnnnnnnnnnnnnnnnnnnnnnnnnnnnnnnnnnnnnnnnnnnnnnnnnnnnnnnnnnnnnnnnnnnnnnnnnnnnnnnnnnnnnnnnnnnnnnnnnnnnnnnnnnnnnnnnnnnnnnnnnnnnnnnnnnnnnnnnnnnnnnnnnnnnnnnnnnnnnnnnnnnnnnnnnnnnnnnnnnnnnnnnnnnnnnnnnnnnnnnnnnnnnnnnnnnnnnnnnnnnnnnnnnnnnnnnnnnnnnnnnnnnnnnnnnnnnnnnnnnnnnnnnnnnnnnnnnnnnnnnnnnnnnnnnnnnnnnnnnnnnnnnnnnnnnnnnnnnnnnnnnnnnnnnnnnnnnnnnnnnnnnnnnnnnnnnnnnnnnnnnnnnnnnnnnnnnnnnnnnnnnnnnnnnnnnnnnnnnnnnnnnnnnnnnnnnnnnnnnnnnnnnnnnnnnnnnnnnnnnnnnnnnnnnnnnnnnnnnnnnnnnnnnnnnnnnnnnnnnnnnnnnnnnnnnnnnnnnnnnnnnnnnnnnnnnnnnnnnnnnnnnnnnnnnnnnnnnnnnnnnnnnnnnnnnnnnnnnnnnnnnnnnnnnnnnnnnnnnnnnnnnnnnnnnnnnnnnnnnnnnnnnnnnnnnnnnnnnnnnnnnnnnnnnnnnnnnnnnnnnnnnnnnnnnnnnnnnnnnnnnnnnnnnnnnnnnnnnnnnnnnnnnnnnnnnnnnnnnnnnnnnnnnnnnnnnnnnnnnnnnnnnnnnnnnnnnnnnnnnnnnnnnnnnnnnnnnnnnnnnnnnnnnnnnnnnnnnnnnnnnnnnnnnnnnnnnnnnnnnnnnnnnnnnnnnnnnnnnnnnnnnnnnnnnnnnnnnnnnnnnnnnnnnnnnnnnnnnnnnnnnnnnnnnnnnnnnnnnnnnnnnnnnnnnnnnnnnnnnnnnnnnnnnnnnnnnnnnnnnnnnnnnnnnnnnnnnnnnnnnnnnnnnnnnnnnnnnnnnnnnnnnnnnnnnnnnnnnnnnnnnnnnnnnnnnnnnnnnnnnnnnnnnnnnnnnnnnnnnnnnnnnnnnnnnnnnnnnnnnnnnnnnnnnnnnnnnnnnnnnnnnnnnnnnnnnnnnnnnnnnnnnnnnnnnnnnnnnnnnnnnnnnnnnnnnnnnnnnnnnnnnnnnnnnnnnnnnnnnnnnnnnnnnnnnnnnnnnnnnnnnnnnnnnnnnnnnnnnnnnnnnnnnnnnnnnnnnnnnnnnnnnnnnnnnnnnnnnnnnnnnnnnnnnnnnnnnnnnnnnnnnnnnnnnnnnnnnnnnnnnnnnnnnnnnnnnnnnnnnnnnnnnnnnnnnnnnnnnnnnnnnnnnnnnnnnnnnnnnnnnnnnnnnnnnnnnnnnnnnnnnnnnnnnnnnnnnnnnnnnnnnnnnnnnnnnnnnnnnnnnnnnnnnnnnnnnnnnnnnnnnnnnnnnnnnnnnnnnnnnnnnnnnnnnnnnnnnnnnnnnnnnnnnnnnnnnnnnnnnnnnnnnnnnnnnnnnnnnnnnnnnnnnnnnnnnnnnnnnnnnnnnnnnnnnnnnnnnnnnnnnnnnnnnnnnnnnnnnnnnnnnnnnnnnnnnnnnnnnnnnnnnnnnnnnnnnnnnnnnnnnnnnnnnnnnnnnnnnnnnnnnnnnnnnnnnnnnnnnnnnnnnnnnnnnnnnnnnnnnnnnnnnnnnnnnnnnnnnnnnnnnnnnnnnnnnnnnnnnnnnnnnnnnnnnnnnnnnnnnnnnnnnnnnnnnnnnnnnnnnnnnnnnnnnnnnnnnnnnnnnnnnnnnnnnnnnnnnnnnnnnnnnnnnnnnnnnnnnnnnnnnnnnnnnnnnnnnnnnnnnnnnnnnnnnnnnnnnnnnnnnnnnnnnnnnnnnnnnnnnnnnnnnnnnnnnnnnnnnnnnnnnnnnnnnnnnnnnnnnnnnnnnnnnnnnnnnnnnnnnnnnnnnnnnnnnnnnnnnnnnnnnnnnnnnnnnnnnnnnnnnnnnnnnnnnnnnnnnnnnnnnnnnnnnnnnnnnnnnnnnnnnnnnnnnnnnnnnnnnnnnnnnnnnnnnnnnnnnnnnnnnnnnnnnnnnnnnnnnnnnnnnnnnnnnnnnnnnnnnnnnnnnnnnnnnnnnnnnnnnnnnnnnnnnnnnnnnnnnnnnnnnnnnnnnnnnnnnnnnnnnnnnnnnnnnnnnnnnnnnnnnnnnnnnnnnnnnnnnnnnnnnnnnnnnnnnnnnnnnnnnnnnnnnnnnnnnnnnnnnnnnnnnnnnnnnnnnnnnnnnnnnnnnnnnnnnnnnnnnnnnnnnnnnnnnnnnnnnnnnnnnnnnnnnnnnnnnnnnnnnnnnnnnnnnnnnnnnnnnnnnnnnnnnnnnnnnnnnnnnnnnnnnnnnnnnnnnnnnnnnnnnnnnnnnnnnnnnnnnnnnnnnnnnnnnnnnnnnnnnnnnnnnnnnnnnnnnnnnnnnnnnnnnnnnnnnnnnnnnnnnnnnnnnnnnnnnnnnnnnnnnnnnnnnnnnnnnnnnnnnnnnnnnnnnnnnnnnnnnnnnnnnnnnnnnnnnnnnnnnnnnnnnnnnnnnnnnnnnnnnnnnnnnnnnnnnnnnnnnnnnnnnnnnnnnnnnnnnnnnnnnnnnnnnnnnnnnnnnnnnnnnnnnnnnnnnnnnnnnnnnnnnnnnnnnnnnnnnnnnnnnnnnnnnnnnnnnnnnnnnnnnnnnnnnnnnnnnnnnnnnnnnnnnnnnnnnnnnnnnnnnnnnnnnnnnnnnnnnnnnnnnnnnnnnnnnnnnnnnnnnnnnnnnnnnnnnnnnnnnnnnnnnnnnnnnnnnnnnnnnnnnnnnnnnnnnnnnnnnnnnnnnnnnnnnnnnnnnnnnnnnnnnnnnnnnnnnnnnnnnnnnnnnnnnnnnnnnnnnnnnnnnnnnnnnnnnnnnnnnnnnnnnnnnnnnnnnnnnnnnnnnnnnnnnnnnnnnnnnnnnnnnnnnnnnnnnnnnnnnnnnnnnnnnnnnnnnnnnnnnnnnnnnnnnnnnnnnnnnnnnnnnnnnnnnnnnnnnnnnnnnnnnnnnnnnnnnnnnnnnnnnnnnnnnnnnnnnnnnnnnnnnnnnnnnnnnnnnnnnnnnnnnnnnnnnnnnnnnnnnnnnnnnnnnnnnnnnnnnnnnnnnnnnnnnnnnnnnnnnnnnnnnnnnnnnnnnnnnnnnnnnnnnnnnnnnnnnnnnnnnnnnnnnnnnnnnnnnnnnnnnnnnnnnnnnnnnnnnnnnnnnnnnnnnnnnnnnnnnnnnnnnnnnnnnnnnnnnnnnnnnnnnnnnnnnnnnnnnnnnnnnnnnnnnnnnnnnnnnnnnnnnnnnnnnnnnnnnnnnnnnnnnnnnnnnnnnnnnnnnnnnnnnnnnnnnnnnnnnnnnnnnnnnnnnnnnnnnnnnnnnnnnnnnnnnnnnnnnnnnnnnnnnnnnnnnnnnnnnnnnnnnnnnnnnnnnnnnnnnnnnnnnnnnnnnnnnnnnnnnnnnnnnnnnnnnnnnnnnnnnnnnnnnnnnnnnnnnnnnnnnnnnnnnnnnnnnnnnnnnnnnnnnnnnnnnnnnnnnnnnnnnnnnnnnnnnnnnnnnnnnnnnnnnnnnnnnnnnnnnnnnnnnnnnnnnnnnnnnnnnnnnnnnnnnnnnnnnnnnnnnnnnnnnnnnnnnnnnnnnnnnnnnnnnnnnnnnnnnnnnnnnnnnnnnnnnnnnnnnnnnnnnnnnnnnnnnnnnnnnnnnnnnnnnnnnnnnnnnnnnnnnnnnnnnnnnnnnnnnnnnnnnnnnnnnnnnnnnnnnnnnnnnnnnnnnnnnnnnnnnnnnnnnnnnnnnnnnnnnnnnnnnnnnnnnnnnnnnnnnnnnnnnnnnnnnnnnnnnnnnnnnnnnnnnnnnnnnnnnnnnnnnnnnnnnnnnnnnnnnnnnnnnnnnnnnnnnnnnnnnnnnnnnnnnnnnnnnnnnnnnnnnnnnnnnnnnnnnnnnnnnnnnnnnnnnnnnnnnnnnnnnnnnnnnnnnnnnnnnnnnnnnnnnnnnnnnnnnnnnnnnnnnnnnnnnnnnnnnnnnnnnnnnnnnnnnnnnnnnnnnnnnnnnnnnnnnnnnnnnnnnnnnnnnnnnnnnnnnnnnnnnnnnnnnnnnnnnnnnnnnnnnnnnnnnnnnnnnnnnnnnnnnnnnnnnnnnnnnnnnnnnnnnnnnnnnnnnnnnnnnnnnnnnnnnnnnnnnnnnnnnnnnnnnnnnnnnnnnnnnnnnnnnnnnnnnnnnnnnnnnnnnnnnnnnnnnnnnnnnnnnnnnnnnnnnnnnnnnnnnnnnnnnnnnnnnnnnnnnnnnnnnnnnnnnnnnnnnnnnnnnnnnnnnnnnnnnnnnnnnnnnnnnnnnnnnnnnnnnnnnnnnnnnnnnnnnnnnnnnnnnnnnnnnnnnnnnnnnnnnnnnnnnnnnnnnnnnnnnnnnnnnnnnnnnnnnnnnnnnnnnnnnnnnnnnnnnnnnnnnnnnnnnnnnnnnnnnnnnnnnnnnnnnnnnnnnnnnnnnnnnnnnnnnnnnnnnnnnnnnnnnnnnnnnnnnnnnnnnnnnnnnnnnnnnnnnnnnnnnnnnnnnnnnnnnnnnnnnnnnnnnnnnnnnnnnnnnnnnnnnnnnnnnnnnnnnnnnnnnnnnnnnnnnnnnnnnnnnnnnnnnnnnnnnnnnnnnnnnnnnnnnnnnnnnnnnnnnnnnnnnnnnnnnnnnnnnnnnnnnnnnnnnnnnnnnnnnnnnnnnnnnnnnnnnnnnnnnnnnnnnnnnnnnnnnnnnnnnnnnnnnnnnnnnnnnnnnnnnnnnnnnnnnnnnnnnnnnnnnnnnnnnnnnnnnnnnnnnnnnnnnnnnnnnnnnnnnnnnnnnnnnnnnnnnnnnnnnnnnnnnnnnnnnnnnnnnnnnnnnnnnnnnnnnnnnnnnnnnnnnnnnnnnnnnnnnnnnnnnnnnnnnnnnnnnnnnnnnnnnnnnnnnnnnnnnnnnnnnnnnnnnnnnnnnnnnnnnnnnnnnnnnnnnnnnnnnnnnnnnnnnnnnnnnnnnnnnnnnnnnnnnnnnnnnnnnnnnnnnnnnnnnnnnnnnnnnnnnnnnnnnnnnnnnnnnnnnnnnnnnnnnnnnnnnnnnnnnnnnnnnnnnnnnnnnnnnnnnnnnnnnnnnnnnnnnnnnnnnnnnnnnnnnnnnnnnnnnnnnnnnnnnnnnnnnnnnnnnnnnnnnnnnnnnnnnnnnnnnnnnnnnnnnnnnnnnnnnnnnnnnnnnnnnnnnnnnnnnnnnnnnnnnnnnnnnnnnnnnnnnnnnnnnnnnnnnnnnnnnnnnnnnnnnnnnnnnnnnnnnnnnnnnnnnnnnnnnnnnnnnnnnnnnnnnnnnnnnnnnnnnnnnnnnnnnnnnnnnnnnnnnnnnnnnnnnnnnnnnnnnnnnnnnnnnnnnnnnnnnnnnnnnnnnnnnnnnnnnnnnnnnnnnnnnnnnnnnnnnnnnnnnnnnnnnnnnnnnnnnnnnnnnnnnnnnnnnnnnnnnnnnnnnnnnnnnnnnnnnnnnnnnnnnnnnnnnnnnnnnnnnnnnnnnnnnnnnnnnnnnnnnnnnnnnnnnnnnnnnnnnnnnnnnnnnnnnnnnnnnnnnnnnnnnnnnnnnnnnnnnnnnnnnnnnnnnnnnnnnnnnnnnnnnnnnnnnnnnnnnnnnnnnnnnnnnnnnnnnnnnnnnnnnnnnnnnnnnnnnnnnnnnnnnnnnnnnnnnnnnnnnnnnnnnnnnnnnnnnnnnnnnnnnnnnnnnnnnnnnnnnnnnnnnnnnnnnnnnnnnnnnnnnnnnnnnnnnnnnnnnnnnnnnnnnnnnnnnnnnnnnnnnnnnnnnnnnnnnnnnnnnnnnnnnnnnnnnnnnnnnnnnnnnnnnnnnnnnnnnnnnnnnnnnnnnnnnnnnnnnnnnnnnnnnnnnnnnnnnnnnnnnnnnnnnnnnnnnnnnnnnnnnnnnnnnnnnnnnnnnnnnnnnnnnnnnnnnnnnnnnnnnnnnnnnnnnnnnnnnnnnnnnnnnnnnnnnnnnnnnnnnnnnnnnnnnnnnnnnnnnnnnnnnnnnnnnnnnnnnnnnnnnnnnnnnnnnnnnnnnnnnnnnnnnnnnnnnnnnnnnnnnnnnnnnnnnnnnnnnnnnnnnnnnnnnnnnnnnnnnnnnnnnnnnnnnnnnnnnnnnnnnnnnnnnnnnnnnnnnnnnnnnnnnnnnnnnnnnnnnnnnnnnnnnnnnnnnnnnnnnnnnnnnnnnnnnnnnnnnnnnnnnnnnnnnnnnnnnnnnnnnnnnnnnnnnnnnnnnnnnnnnnnnnnnnnnnnnnnnnnnnnnnnnnnnnnnnnnnnnnnnnnnnnnnnnnnnnnnnnnnnnnnnnnnnnnnnnnnnnnnnnnnnnnnnnnnnnnnnnnnnnnnnnnnnnnnnnnnnnnnnnnnnnnnnnnnnnnnnnnnnnnnnnnnnnnnnnnnnnnnnnnnnnnnnnnnnnnnnnnnnnnnnnnnnnnnnnnnnnnnnnnnnnnnnnnnnnnnnnnnnnnnnnnnnnnnnnnnnnnnnnnnnnnnnnnnnnnnnnnnnnnnnnnnnnnnnnnnnnnnnnnnnnnnnnnnnnnnnnnnnnnnnnnnnnnnnnnnnnnnnnnnnnnnnnnnnnnnnnnnnnnnnnnnnnnnnnnnnnnnnnnnnnnnnnnnnnnnnnnnnnnnnnnnnnnnnnnnnnnnnnnnnnnnnnnnnnnnnnnnnnnnnnnnnnnnnnnnnnnnnnnnnnnnnnnnnnnnnnnnnnnnnnnnnnnnnnnnnnnnnnnnnnnnnnnnnnnnnnnnnnnnnnnnnnnnnnnnnnnnnnnnnnnnnnnnnnnnnnnnnnnnnnnnnnnnnnnnnnnnnnnnnnnnnnnnnnnnnnnnnnnnnnnnnnnnnnnnnnnnnnnnnnnnnnnnnnnnnnnnnnnnnnnnnnnnnnnnnnnnnnnnnnnnnnnnnnnnnnnnnnnnnnnnnnnnnnnnnnnnnnnnnnnnnnnnnnnnnnnnnnnnnnnnnnnnnnnnnnnnnnnnnnnnnnnnnnnnnnnnnnnnnnnnnnnnnnnnnnnnnnnnnnnnnnnnnnnnnnnnnnnnnnnnnnnnnnnnnnnnnnnnnnnnnnnnnnnnnnnnnnnnnnnnnnnnnnnnnnnnnnnnnnnnnnnnnnnnnnnnnnnnnnnnnnnnnnnnnnnnnnnnnnnnnnnnnnnnnnnnnnnnnnnnnnnnnnnnnnnnnnnnnnnnnnnnnnnnnnnnnnnnnnnnnnnnnnnnnnnnnnnnnnnnnnnnnnnnnnnnnnnnnnnnnnnnnnnnnnnnnnnnnnnnnnnnnnnnnnnnnnnnnnnnnnnnnnnnnnnnnnnnnnnnnnnnnnnnnnnnnnnnnnnnnnnnnnnnnnnnnnnnnnnnnnnnnnnnnnnnnnnnnnnnnnnnnnnnnnnnnnnnnnnnnnnnnnnnnnnnnnnnnnnnnnnnnnnnnnnnnnnnnnnnnnnnnnnnnnnnnnnnnnnnnnnnnnnnnnnnnnnnnnnnnnnnnnnnnnnnnnnnnnnnnnnnnnnnnnnnnnnnnnnnnnnnnnnnnnnnnnnnnnnnnnnnnnnnnnnnnnnnnnnnnnnnnnnnnnnnnnnnnnnnnnnnnnnnnnnnnnnnnnnnnnnnnnnnnnnnnnnnnnnnnnnnnnnnnnnnnnnnnnnnnnnnnnnnnnnnnnnnnnnnnnnnnnnnnnnnnnnnnnnnnnnnnnnnnnnnnnnnnnnnnnnnnnnnnnnnnnnnnnnnnnnnnnnnnnnnnnnnnnnnnnnnnnnnnnnnnnnnnnnnnnnnnnnnnnnnnnnnnnnnnnnnnnnnnnnnnnnnnnnnnnnnnnnnnnnnnnnnnnnnnnnnnnnnnnnnnnnnnnnnnnnnnnnnnnnnnnnnnnnnnnnnnnnnnnnnnnnnnnnnnnnnnnnnnnnnnnnnnnnnnnnnnnnnnnnnnnnnnnnnnnnnnnnnnnnnnnnnnnnnnnnnnnnnnnnnnnnnnnnnnnnnnnnnnnnnnnnnnnnnnnnnnnnnnnnnnnnnnnnnnnnnnnnnnnnnnnnnnnnnnnnnnnnnnnnnnnnnnnnnnnnnnnnnnnnnnnnnnnnnnnnnnnnnnnnnnnnnnnnnnnnnnnnnnnnnnnnnnnnnnnnnnnnnnnnnnnnnnnnnnnnnnnnnnnnnnnnnnnnnnnnnnnnnnnnnnnnnnnnnnnnnnnnnnnnnnnnnnnnnnnnnnnnnnnnnnnnnnnnnnnnnnnnnnnnnnnnnnnnnnnnnnnnnnnnnnnnnnnnnnnnnnnnnnnnnnnnnnnnnnnnnnnnnnnnnnnnnnnnnnnnnnnnnnnnnnnnnnnnnnnnnnnnnnnnnnnnnnnnnnnnnnnnnnnnnnnnnnnnnnnnnnnnnnnnnnnnnnnnnnnnnnnnnnnnnnnnnnnnnnnnnnnnnnnnnnnnnnnnnnnnnnnnnnnnnnnnnnnnnnnnnnnnnnnnnnnnnnnnnnnnnnnnnnnnnnnnnnnnnnnnnnnnnnnnnnnnnnnnnnnnnnnnnnnnnnnnnnnnnnnnnnnnnnnnnnnnnnnnnnnnnnnnnnnnnnnnnnnnnnnnnnnnnnnnnnnnnnnnnnnnnnnnnnnnnnnnnnnnnnnnnnnnnnnnnnnnnnnnnnnnnnnnnnnnnnnnnnnnnnnnnnnnnnnnnnnnnnnnnnnnnnnnnnnnnnnnnnnnnnnnnnnnnnnnnnnnnnnnnnnnnnnnnnnnnnnnnnnnnnnnnnnnnnnnnnnnnnnnnnnnnnnnnnnnnnnnnnnnnnnnnnnnnnnnnnnnnnnnnnnnnnnnnnnnnnnnnnnnnnnnnnnnnnnnnnnnnnnnnnnnnnnnnnnnnnnnnnnnnnnnnnnnnnnnnnnnnnnnnnnnnnnnnnnnnnnnnnnnnnnnnnnnnnnnnnnnnnnnnnnnnnnnnnnnnnnnnnnnnnnnnnnnnnnnnnnnnnnnnnnnnnnnnnnnnnnnnnnnnnnnnnnnnnnnnnnnnnnnnnnnnnnnnnnnnnnnnnnnnnnnnnnnnnnnnnnnnnnnnnnnnnnnnnnnnnnnnnnnnnnnnnnnnnnnnnnnnnnnnnnnnnnnnnnnnnnnnnnnnnnnnnnnnnnnnnnnnnnnnnnnnnnnnnnnnnnnnnnnnnnnnnnnnnnnnnnnnnnnnnnnnnnnnnnnnnnnnnnnnnnnnnnnnnnnnnnnnnnnnnnnnnnnnnnnnnnnnnnnnnnnnnnnnnnnnnnnnnnnnnnnnnnnnnnnnnnnnnnnnnnnnnnnnnnnnnnnnnnnnnnnnnnnnnnnnnnnnnnnnnnnnnnnnnnnnnnnnnnnnnnnnnnnnnnnnnnnnnnnnnnnnnnnnnnnnnnnnnnnnnnnnnnnnnnnnnnnnnnnnnnnnnnnnnnnnnnnnnnnnnnnnnnnnnnnnnnnnnnnnnnnnnnnnnnnnnnnnnnnnnnnnnnnnnnnnnnnnnnnnnnnnnnnnnnnnnnnnnnnnnnnnnnnnnnnnnnnnnnnnnnnnnnnnnnnnnnnnnnnnnnnnnnnnnnnnnnnnnnnnnnnnnnnnnnnnnnnnnnnnnnnnnnnnnnnnnnnnnnnnnnnnnnnnnnnnnnnnnnnnnnnnnnnnnnnnnnnnnnnnnnnnnnnnnnnnnnnnnnnnnnnnnnnnnnnnnnnnnnnnnnnnnnnnnnnnnnnnnnnnnnnnnnnnnnnnnnnnnnnnnnnnnnnnnnnnnnnnnnnnnnnnnnnnnnnnnnnnnnnnnnnnnnnnnnnnnnnnnnnnnnnnnnnnnnnnnnnnnnnnnnnnnnnnnnnnnnnnnnnnnnnnnnnnnnnnnnnnnnnnnnnnnnnnnnnnnnnnnnnnnnnnnnnnnnnnnnnnnnnnnnnnnnnnnnnnnnnnnnnnnnnnnnnnnnnnnnnnnnnnnnnnnnnnnnnnnnnnnnnnnnnnnnnnnnnnnnnnnnnnnnnnnnnnnnnnnnnnnnnnnnnnnnnnnnnnnnnnnnnnnnnnnnnnnnnnnnnnnnnnnnnnnnnnnnnnnnnnnnnnnnnnnnnnnnnnnnnnnnnnnnnnnnnnnnnnnnnnnnnnnnnnnnnnnnnnnnnnnnnnnnnnnnnnnnnnnnnnnnnnnnnnnnnnnnnnnnnnnnnnnnnnnnnnnnnnnnnnnnnnnnnnnnnnnnnnnnnnnnnnnnnnnnnnnnnnnnnnnnnnnnnnnnnnnnnnnnnnnnnnnnnnnnnnnnnnnnnnnnnnnnnnnnnnnnnnnnnnnnnnnnnnnnnnnnnnnnnnnnnnnnnnnnnnnnnnnnnnnnnnnnnnnnnnnnnnnnnnnnnnnnnnnnnnnnnnnnnnnnnnnnnnnnnnnnnnnnnnnnnnnnnnnnnnnnnnnnnnnnnnnnnnnnnnnnnnnnnnnnnnnnnnnnnnnnnnnnnnnnnnnnnnnnnnnnnnnnnnnnnnnnnnnnnnnnnnnnnnnnnnnnnnnnnnnnnnnnnnnnnnnnnnnnnnnnnnnnnnnnnnnnnnnnnnnnnnnnnnnnnnnnnnnnnnnnnnnnnnnnnnnnnnnnnnnnnnnnnnnnnnnnnnnnnnnnnnnnnnnnnnnnnnnnnnnnnnnnnnnnnnnnnnnnnnnnnnnnnnnnnnnnnnnnnnnnnnnnnnnnnnnnnnnnnnnnnnnnnnnnnnnnnnnnnnnnnnnnnnnnnnnnnnnnnnnnnnnnnnnnnnnnnnnnnnnnnnnnnnnnnnnnnnnnnnnnnnnnnnnnnnnnnnnnnnnnnnnnnnnnnnnnnnnnnnnnnnnnnnnnnnnnnnnnnnnnnnnnnnnnnnnnnnnnnnnnnnnnnnnnnnnnnnnnnnnnnnnnnnnnnnnnnnnnnnnnnnnnnnnnnnnnnnnnnnnnnnnnnnnnnnnnnnnnnnnnnnnnnnnnnnnnnnnnnnnnnnnnnnnnnnnnnnnnnnnnnnnnnnnnnnnnnnnnnnnnnnnnnnnnnnnnnnnnnnnnnnnnnnnnnnnnnnnnnnnnnnnnnnnnnnnnnnnnnnnnnnnnnnnnnnnnnnnnnnnnnnnnnnnnnnnnnnnnnnnnnnnnnnnnnnnnnnnnnnnnnnnnnnnnnnnnnnnnnnnnnnnnnnnnnnnnnnnnnnnnnnnnnnnnnnnnnnnnnnnnnnnnnnnnnnnnnnnnnnnnnnnnnnnnnnnnnnnnnnnnnnnnnnnnnnnnnnnnnnnnnnnnnnnnnnnnnnnnnnnnnnnnnnnnnnnnnnnnnnnnnnnnnnnnnnnnnnnnnnnnnnnnnnnnnnnnnnnnnnnnnnnnnnnnnnnnnnnnnnnnnnnnnnnnnnnnnnnnnnnnnnnnnnnnnnnnnnnnnnnnnnnnnnnnnnnnnnnnnnnnnnnnnnnnnnnnnnnnnnnnnnnnnnnnnnnnnnnnnnnnnnnnnnnnnnnnnnnnnnnnnnnnnnnnnnnnnnnnnnnnnnnnnnnnnnnnnnnnnnnnnnnnnnnnnnnnnnnnnnnnnnnnnnnnnnnnnnnnnnnnnnnnnnnnnnnnnnnnnnnnnnnnnnnnnnnnnnnnnnnnnnnnnnnnnnnnnnnnnnnnnnnnnnnnnnnnnnnnnnnnnnnnnnnnnnnnnnnnnnnnnnnnnnnnnnnnnnnnnnnnnnnnnnnnnnnnnnnnnnnnnnnnnnnnnnnnnnnnnnnnnnnnnnnnnnnnnnnnnnnnnnnnnnnnnnnnnnnnnnnnnnnnnnnnnnnnnnnnnnnnnnnnnnnnnnnnnnnnnnnnnnnnnnnnnnnnnnnnnnnnnnnnnnnnnnnnnnnnnnnnnnnnnnnnnnnnnnnnnnnnnnnnnnnnnnnnnnnnnnnnnnnnnnnnnnnnnnnnnnnnnnnnnnnnnnnnnnnnnnnnnnnnnnnnnnnnnnnnnnnnnnnnnnnnnnnnnnnnnnnnnnnnnnnnnnnnnnnnnnnnnnnnnnnnnnnnnnnnnnnnnnnnnnnnnnnnnnnnnnnnnnnnnnnnnnnnnnnnnnnnnnnnnnnnnnnnnnnnnnnnnnnnnnnnnnnnnnnnnnnnnnnnnnnnnnnnnnnnnnnnnnnnnnnnnnnnnnnnnnnnnnnnnnnnnnnnnnnnnnnnnnnnnnnnnnnnnnnnnnnnnnnnnnnnnnnnnnnnnnnnnnnnnnnnnnnnnnnnnnnnnnnnnnnnnnnnnnnnnnnnnnnnnnnnnnnnnnnnnnnnnnnnnnnnnnnnnnnnnnnnnnnnnnnnnnnnnnnnnnnnnnnnnnnnnnnnnnnnnnnnnnnnnnnnnnnnnnnnnnnnnnnnnnnnnnnnnnnnnnnnnnnnnnnnnnnnnnnnnnnnnnnnnnnnnnnnnnnnnnnnnnnnnnnnnnnnnnnnnnnnnnnnnnnnnnnnnnnnnnnnnnnnnnnnnnnnnnnnnnnnnnnnnnnnnnnnnnnnnnnnnnnnnnnnnnnnnnnnnnnnnnnnnnnnnnnnnnnnnnnnnnnnnnnnnnnnnnnnnnnnnnnnnnnnnnnnnnnnnnnnnnnnnnnnnnnnnnnnnnnnnnnnnnnnnnnnnnnnnnnnnnnnnnnnnnnnnnnnnnnnnnnnnnnnnnnnnnnnnnnnnnnnnnnnnnnnnnnnnnnnnnnnnnnnnnnnnnnnnnnnnnnnnnnnnnnnnnnnnnnnnnnnnnnnnnnnnnnnnnnnnnnnnnnnnnnnnnnnnnnnnnnnnnnnnnnnnnnnnnnnnnnnnnnnnnnnnnnnnnnnnnnnnnnnnnnnnnnnnnnnnnnnnnnnnnnnnnnnnnnnnnnnnnnnnnnnnnnnnnnnnnnnnnnnnnnnnnnnnnnnnnnnnnnnnnnnnnnnnnnnnnnnnnnnnnnnnnnnnnnnnnnnnnnnnnnnnnnnnnnnnnnnnnnnnnnnnnnnnnnnnnnnnnnnnnnnnnnnnnnnnnnnnnnnnnnnnnnnnnnnnnnnnnnnnnnnnnnnnnnnnnnnnnnnnnnnnnnnnnnnnnnnnnnnnnnnnnnnnnnnnnnnnnnnnnnnnnnnnnnnnnnnnnnnnnnnnnnnnnnnnnnnnnnnnnnnnnnnnnnnnnnnnnnnnnnnnnnnnnnnnnnnnnnnnnnnnnnnnnnnnnnnnnnnnnnnnnnnnnnnnnnnnnnnnnnnnnnnnnnnnnnnnnnnnnnnnnnnnnnnnnnnnnnnnnnnnnnnnnnnnnnnnnnnnnnnnnnnnnnnnnnnnnnnnnnnnnnnnnnnnnnnnnnnnnnnnnnnnnnnnnnnnnnnnnnnnnnnnnnnnnnnnnnnnnnnnnnnnnnnnnnnnnnnnnnnnnnnnnnnnnnnnnnnnnnnnnnnnnnnnnnnnnnnnnnnnnnnnnnnnnnnnnnnnnnnnnnnnnnnnnnnnnnnnnnnnnnnnnnnnnnnnnnnnnnnnnnnnnnnnnnnnnnnnnnnnnnnnnnnnnnnnnnnnnnnnnnnnnnnnnnnnnnnnnnnnnnnnnnnnnnnnnnnnnnnnnnnnnnnnnnnnnnnnnnnnnnnnnnnnnnnnnnnnnnnnnnnnnnnnnnnnnnnnnnnnnnnnnnnnnnnnnnnnnnnnnnnnnnnnnnnnnnnnnnnnnnnnnnnnnnnnnnnnnnnnnnnnnnnnnnnnnnnnnnnnnnnnnnnnnnnnnnnnnnnnnnnnnnnnnnnnnnnnnnnnnnnnnnnnnnnnnnnnnnnnnnnnnnnnnnnnnnnnnnnnnnnnnnnnnnnnnnnnnnnnnnnnnnnnnnnnnnnnnnnnnnnnnnnnnnnnnnnnnnnnnnnnnnnnnnnnnnnnnnnnnnnnnnnnnnnnnnnnnnnnnnnnnnnnnnnnnnnnnnnnnnnnnnnnnnnnnnnnnnnnnnnnnnnnnnnnnnnnnnnnnnnnnnnnnnnnnnnnnnnnnnnnnnnnnnnnnnnnnnnnnnnnnnnnnnnnnnnnnnnnnnnnnnnnnnnnnnnnnnnnnnnnnnnnnnnnnnnnnnnnnnnnnnnnnnnnnnnnnnnnnnnnnnnnnnnnnnnnnnnnnnnnnnnnnnnnnnnnnnnnnnnnnnnnnnnnnnnnnnnnnnnnnnnnnnnnnnnnnnnnnnnnnnnnnnnnnnnnnnnnnnnnnnnnnnnnnnnnnnnnnnnnnnnnnnnnnnnnnnnnnnnnnnnnnnnnnnnnnnnnnnnnnnnnnnnnnnnnnnnnnnnnnnnnnnnnnnnnnnnnnnnnnnnnnnnnnnnnnnnnnnnnnnnnnnnnnnnnnnnnnnnnnnnnnnnnnnnnnnnnnnnnnnnnnnnnnnnnnnnnnnnnnnnnnnnnnnnnnnnnnnnnnnnnnnnnnnnnnnnnnnnnnnnnnnnnnnnnnnnnnnnnnnnnnnnnnnnnnnnnnnnnnnnnnnnnnnnnnnnnnnnnnnnnnnnnnnnnnnnnnnnnnnnnnnnnnnnnnnnnnnnnnnnnnnnnnnnnnnnnnnnnnnnnnnnnnnnnnnnnnnnnnnnnnnnnnnnnnnnnnnnnnnnnnnnnnnnnnnnnnnnnnnnnnnnnnnnnnnnnnnnnnnnnnnnnnnnnnnnnnnnnnnnnnnnnnnnnnnnnnnnnnnnnnnnnnnnnnnnnnnnnnnnnnnnnnnnnnnnnnnnnnnnnnnnnnnnnnnnnnnnnnnnnnnnnnnnnnnnnnnnnnnnnnnnnnnnnnnnnnnnnnnnnnnnnnnnnnnnnnnnnnnnnnnnnnnnnnnnnnnnnnnnnnnnnnnnnnnnnnnnnnnnnnnnnnnnnnnnnnnnnnnnnnnnnnnnnnnnnnnnnnnnnnnnnnnnnnnnnnnnnnnnnnnnnnnnnnnnnnnnnnnnnnnnnnnnnnnnnnnnnnnnnnnnnnnnnnnnnnnnnnnnnnnnnnnnnnnnnnnnnnnnnnnnnnnnnnnnnnnnnnnnnnnnnnnnnnnnnnnnnnnnnnnnnnnnnnnnnnnnnnnnnnnnnnnnnnnnnnnnnnnnnnnnnnnnnnnnnnnnnnnnnnnnnnnnnnnnnnnnnnnnnnnnnnnnnnnnnnnnnnnnnnnnnnnnnnnnnnnnnnnnnnnnnnnnnnnnnnnnnnnnnnnnnnnnnnnnnnnnnnnnnnnnnnnnnnnnnnnnnnnnnnnnnnnnnnnnnnnnnnnnnnnnnnnnnnnnnnnnnnnnnnnnnnnnnnnnnnnnnnnnnnnnnnnnnnnnnnnnnnnnnnnnnnnnnnnnnnnnnnnnnnnnnnnnnnnnnnnnnnnnnnnnnnnnnnnnnnnnnnnnnnnnnnnnnnnnnnnnnnnnnnnnnnnnnnnnnnnnnnnnnnnnnnnnnnnnnnnnnnnnnnnnnnnnnnnnnnnnnnnnnnnnnnnnnnnnnnnnnnnnnnnnnnnnnnnnnnnnnnnnnnnnnnnnnnnnnnnnnnnnnnnnnnnnnnnnnnnnnnnnnnnnnnnnnnnnnnnnnnnnnnnnnnnnnnnnnnnnnnnnnnnnnnnnnnnnnnnnnnnnnnnnnnnnnnnnnnnnnnnnnnnnnnnnnnnnnnnnnnnnnnnnnnnnnnnnnnnnnnnnnnnnnnnnnnnnnnnnnnnnnnnnnnnnnnnnnnnnnnnnnnnnnnnnnnnnnnnnnnnnnnnnnnnnnnnnnnnnnnnnnnnnnnnnnnnnnnnnnnnnnnnnnnnnnnnnnnnnnnnnnnnnnnnnnnnnnnnnnnnnnnnnnnnnnnnnnnnnnnnnnnnnnnnnnnnnnnnnnnnnnnnnnnnnnnnnnnnnnnnnnnnnnnnnnnnnnnnnnnnnnnnnnnnnnnnnnnnnnnnnnnnnnnnnnnnnnnnnnnnnnnnnnnnnnnnnnnnnnnnnnnnnnnnnnnnnnnnnnnnnnnnnnnnnnnnnnnnnnnnnnnnnnnnnnnnnnnnnnnnnnnnnnnnnnnnnnnnnnnnnnnnnnnnnnnnnnnnnnnnnnnnnnnnnnnnnnnnnnnnnnnnnnnnnnnnnnnnnnnnnnnnnnnnnnnnnnnnnnnnnnnnnnnnnnnnnnnnnnnnnnnnnnnnnnnnnnnnnnnnnnnnnnnnnnnnnnnnnnnnnnnnnnnnnnnnnnnnnnnnnnnnnnnnnnnnnnnnnnnnnnnnnnnnnnnnnnnnnnnnnnnnnnnnnnnnnnnnnnnnnnnnnnnnnnnnnnnnnnnnnnnnnnnnnnnnnnnnnnnnnnnnnnnnnnnnnnnnnnnnnnnnnnnnnnnnnnnnnnnnnnnnnnnnnnnnnnnnnnnnnnnnnnnnnnnnnnnnnnnnnnnnnnnnnnnnnnnnnnnnnnnnnnnnnnnnnnnnnnnnnnnnnnnnnnnnnnnnnnnnnnnnnnnnnnnnnnnnnnnnnnnnnnnnnnnnnnnnnnnnnnnnnnnnnnnnnnnnnnnnnnnnnnnnnnnnnnnnnnnnnnnnnnnnnnnnnnnnnnnnnnnnnnnnnnnnnnnnnnnnnnnnnnnnnnnnnnnnnnnnnnnnnnnnnnnnnnnnnnnnnnnnnnnnnnnnnnnnnnnnnnnnnnnnnnnnnnnnnnnnnnnnnnnnnnnnnnnnnnnnnnnnnnnnnnnnnnnnnnnnnnnnnnnnnnnnnnnnnnnnnnnnnnnnnnnnnnnnnnnnnnnnnnnnnnnnnnnnnnnnnnnnnnnnnnnnnnnnnnnnnnnnnnnnnnnnnnnnnnnnnnnnnnnnnnnnnnnnnnnnnnnnnnnnnnnnnnnnnnnnnnnnnnnnnnnnnnnnnnnnnnnnnnnnnnnnnnnnnnnnnnnnnnnnnnnnnnnnnnnnnnnnnnnnnnnnnnnnnnnnnnnnnnnnnnnnnnnnnnnnnnnnnnnnnnnnnnnnnnnnnnnnnnnnnnnnnnnnnnnnnnnnnnnnnnnnnnnnnnnnnnnnnnnnnnnnnnnnnnnnnnnnnnnnnnnnnnnnnnnnnnnnnnnnnnnnnnnnnnnnnnnnnnnnnnnnnnnnnnnnnnnnnnnnnnnnnnnnnnnnnnnnnnnnnnnnnnnnnnnnnnnnnnnnnnnnnnnnnnnnnnnnnnnnnnnnnnnnnnnnnnnnnnnnnnnnnnnnnnnnnnnnnnnnnnnnnnnnnnnnnnnnnnnnnnnnnnnnnnnnnnnnnnnnnnnnnnnnnnnnnnnnnnnnnnnnnnnnnnnnnnnnnnnnnnnnnnnnnnnnnnnnnnnnnnnnnnnnnnnnnnnnnnnnnnnnnnnnnnnnnnnnnnnnnnnnnnnnnnnnnnnnnnnnnnnnnnnnnnnnnnnnnnnnnnnnnnnnnnnnnnnnnnnnnnnnnnnnnnnnnnnnnnnnnnnnnnnnnnnnnnnnnnnnnnnnnnnnnnnnnnnnnnnnnnnnnnnnnnnnnnnnnnnnnnnnnnnnnnnnnnnnnnnnnnnnnnnnnnnnnnnnnnnnnnnnnnnnnnnnnnnnnnnnnnnnnnnnnnnnnnnnnnnnnnnnnnnnnnnnnnnnnnnnnnnnnnnnnnnnnnnnnnnnnnnnnnnnnnnnnnnnnnnnnnnnnnnnnnnnnnnnnnnnnnnnnnnnnnnnnnnnnnnnnnnnnnnnnnnnnnnnnnnnnnnnnnnnnnnnnnnnnnnnnnnnnnnnnnnnnnnnnnnnnnnnnnnnnnnnnnnnnnnnnnnnnnnnnnnnnnnnnnnnnnnnnnnnnnnnnnnnnnnnnnnnnnnnnnnnnnnnnnnnnnnnnnnnnnnnnnnnnnnnnnnnnnnnnnnnnnnnnnnnnnnnnnnnnnnnnnnnnnnnnnnnnnnnnnnnnnnnnnnnnnnnnnnnnnnnnnnnnnnnnnnnnnnnnnnnnnnnnnnnnnnnnnnnnnnnnnnnnnnnnnnnnnnnnnnnnnnnnnnnnnnnnnnnnnnnnnnnnnnnnnnnnnnnnnnnnnnnnnnnnnnnnnnnnnnnnnnnnnnnnnnnnnnnnnnnnnnnnnnnnnnnnnnnnnnnnnnnnnnnnnnnnnnnnnnnnnnnnnnnnnnnnnnnnnnnnnnnnnnnnnnnnnnnnnnnnnnnnnnnnnnnnnnnnnnnnnnnnnnnnnnnnnnnnnnnnnnnnnnnnnnnnnnnnnnnnnnnnnnnnnnnnnnnnnnnnnnnnnnnnnnnnnnnnnnnnnnnnnnnnnnnnnnnnnnnnnnnnnnnnnnnnnnnnnnnnnnnnnnnnnnnnnnnnnnnnnnnnnnnnnnnnnnnnnnnnnnnnnnnnnnnnnnnnnnnnnnnnnnnnnnnnnnnnnnnnnnnnnnnnnnnnnnnnnnnnnnnnnnnnnnnnnnnnnnnnnnnnnnnnnnnnnnnnnnnnnnnnnnnnnnnnnnnnnnnnnnnnnnnnnnnnnnnnnnnnnnnnnnnnnnnnnnnnnnnnnnnnnnnnnnnnnnnnnnnnnnnnnnnnnnnnnnnnnnnnnnnnnnnnnnnnnnnnnnnnnnnnnnnnnnnnnnnnnnnnnnnnnnnnnnnnnnnnnnnnnnnnnnnnnnnnnnnnnnnnnnnnnnnnnnnnnnnnnnnnnnnnnnnnnnnnnnnnnnnnnnnnnnnnnnnnnnnnnnnnnnnnnnnnnnnnnnnnnnnnnnnnnnnnnnnnnnnnnnnnnnnnnnnnnnnnnnnnnnnnnnnnnnnnnnnnnnnnnnnnnnnnnnnnnnnnnnnnnnnnnnnnnnnnnnnnnnnnnnnnnnnnnnnnnnnnnnnnnnnnnnnnnnnnnnnnnnnnnnnnnnnnnnnnnnnnnnnnnnnnnnnnnnnnnnnnnnnnnnnnnnnnnnnnnnnnnnnnnnnnnnnnnnnnnnnnnnnnnnnnnnnnnnnnnnnnnnnnnnnnnnnnnnnnnnnnnnnnnnnnnnnnnnnnnnnnnnnnnnnnnnnnnnnnnnnnnnnnnnnnnnnnnnnnnnnnnnnnnnnnnnnnnnnnnnnnnnnnnnnnnnnnnnnnnnnnnnnnnnnnnnnnnnnnnnnnnnnnnnnnnnnnnnnnnnnnnnnnnnnnnnnnnnnnnnnnnnnnnnnnnnnnnnnnnnnnnnnnnnnnnnnnnnnnnnnnnnnnnnnnnnnnnnnnnnnnnnnnnnnnnnnnnnnnnnnnnnnnnnnnnnnnnnnnnnnnnnnnnnnnnnnnnnnnnnnnnnnnnnnnnnnnnnnnnnnnnnnnnnnnnnnnnnnnnnnnnnnnnnnnnnnnnnnnnnnnnnnnnnnnnnnnnnnnnnnnnnnnnnnnnnnnnnnnnnnnnnnnnnnnnnnnnnnnnnnnnnnnnnnnnnnnnnnnnnnnnnnnnnnnnnnnnnnnnnnnnnnnnnnnnnnnnnnnnnnnnnnnnnnnnnnnnnnnnnnnnnnnnnnnnnnnnnnnnnnnnnnnnnnnnnnnnnnnnnnnnnnnnnnnnnnnnnnnnnnnnnnnnnnnnnnnnnnnnnnnnnnnnnnnnnnnnnnnnnnnnnnnnnnnnnnnnnnnnnnnnnnnnnnnnnnnnnnnnnnnnnnnnnnnnnnnnnnnnnnnnnnnnnnnnnnnnnnnnnnnnnnnnnnnnnnnnnnnnnnnnnnnnnnnnnnnnnnnnnnnnnnnnnnnnnnnnnnnnnnnnnnnnnnnnnnnnnnnnnnnnnnnnnnnnnnnnnnnnnnnnnnnnnnnnnnnnnnnnnnnnnnnnnnnnnnnnnnnnnnnnnnnnnnnnnnnnnnnnnnnnnnnnnnnnnnnnnnnnnnnnnnnnnnnnnnnnnnnnnnnnnnnnnnnnnnnnnnnnnnnnnnnnnnnnnnnnnnnnnnnnnnnnnnnnnnnnnnnnnnnnnnnnnnnnnnnnnnnnnnnnnnnnnnnnnnnnnnnnnnnnnnnnnnnnnnnnnnnnnnnnnnnnnnnnnnnnnnnnnnnnnnnnnnnnnnnnnnnnnnnnnnnnnnnnnnnnnnnnnnnnnnnnnnnnnnnnnnnnnnnnnnnnnnnnnnnnnnnnnnnnnnnnnnnnnnnnnnnnnnnnnnnnnnnnnnnnnnnnnnnnnnnnnnnnnnnnnnnnnnnnnnnnnnnnnnnnnnnnnnnnnnnnnnnnnnnnnnnnnnnnnnnnnnnnnnnnnnnnnnnnnnnnnnnnnnnnnnnnnnnnnnnnnnnnnnnnnnnnnnnnnnnnnnnnnnnnnnnnnnnnnnnnnnnnnnnnnnnnnnnnnnnnnnnnnnnnnnnnnnnnnnnnnnnnnnnnnnnnnnnnnnnnnnnnnnnnnnnnnnnnnnnnnnnnnnnnnnnnnnnnnnnnnnnnnnnnnnnnnnnnnnnnnnnnnnnnnnnnnnnnnnnnnnnnnnnnnnnnnnnnnnnnnnnnnnnnnnnnnnnnnnnnnnnnnnnnnnnnnnnnnnnnnnnnnnnnnnnnnnnnnnnnnnnnnnnnnnnnnnnnnnnnnnnnnnnnnnnnnnnnnnnnnnnnnnnnnnnnnnnnnnnnnnnnnnnnnnnnnnnnnnnnnnnnnnnnnnnnnnnnnnnnnnnnnnnnnnnnnnnnnnnnnnnnnnnnnnnnnnnnnnnnnnnnnnnnnnnnnnnnnnnnnnnnnnnnnnnnnnnnnnnnnnnnnnnnnnnnnnnnnnnnnnnnnnnnnnnnnnnnnnnnnnnnnnnnnnnnnnnnnnnnnnnnnnnnnnnnnnnnnnnnnnnnnnnnnnnnnnnnnnnnnnnnnnnnnnnnnnnnnnnnnnnnnnnnnnnnnnnnnnnnnnnnnnnnnnnnnnnnnnnnnnnnnnnnnnnnnnnnnnnnnnnnnnnnnnnnnnnnnnnnnnnnnnnnnnnnnnnnnnnnnnnnnnnnnnnnnnnnnnnnnnnnnnnnnnnnnnnnnnnnnnnnnnnnnnnnnnnnnnnnnnnnnnnnnnnnnnnnnnnnnnnnnnnnnnnnnnnnnnnnnnnnnnnnnnnnnnnnnnnnnnnnnnnnnnnnnnnnnnnnnnnnnnnnnnnnnnnnnnnnnnnnnnnnnnnnnnnnnnnnnnnnnnnnnnnnnnnnnnnnnnnnnnnnnnnnnnnnnnnnnnnnnnnnnnnnnnnnnnnnnnnnnnnnnnnnnnnnnnnnnnnnnnnnnnnnnnnnnnnnnnnnnnnnnnnnnnnnnnnnnnnnnnnnnnnnnnnnnnnnnnnnnnnnnnnnnnnnnnnnnnnnnnnnnnnnnnnnnnnnnnnnnnnnnnnnnnnnnnnnnnnnnnnnnnnnnnnnnnnnnnnnnnnnnnnnnnnnnnnnnnnnnnnnnnnnnnnnnnnnnnnnnnnnnnnnnnnnnnnnnnnnnnnnnnnnnnnnnnnnnnnnnnnnnnnnnnnnnnnnnnnnnnnnnnnnnnnnnnnnnnnnnnnnnnnnnnnnnnnnnnnnnnnnnnnnnnnnnnnnnnnnnnnnnnnnnnnnnnnnnnnnnnnnnnnnnnnnnnnnnnnnnnnnnnnnnnnnnnnnnnnnnnnnnnnnnnnnnnnnnnnnnnnnnnnnnnnnnnnnnnnnnnnnnnnnnnnnnnnnnnnnnnnnnnnnnnnnnnnnnnnnnnnnnnnnnnnnnnnnnnnnnnnnnnnnnnnnnnnnnnnnnnnnnnnnnnnnnnnnnnnnnnnnnnnnnnnnnnnnnnnnnnnnnnnnnnnnnnnnnnnnnnnnnnnnnnnnnnnnnnnnnnnnnnnnnnnnnnnnnnnnnnnnnnnnnnnnnnnnnnnnnnnnnnnnnnnnnnnnnnnnnnnnnnnnnnnnnnnnnnnnnnnnnnnnnnnnnnnnnnnnnnnnnnnnnnnnnnnnnnnnnnnnnnnnnnnnnnnnnnnnnnnnnnnnnnnnnnnnnnnnnnnnnnnnnnnnnnnnnnnnnnnnnnnnnnnnnnnnnnnnnnnnnnnnnnnnnnnnnnnnnnnnnnnnnnnnnnnnnnnnnnnnnnnnnnnnnnnnnnnnnnnnnnnnnnnnnnnnnnnnnnnnnnnnnnnnnnnnnnnnnnnnnnnnnnnnnnnnnnnnnnnnnnnnnnnnnnnnnnnnnnnnnnnnnnnnnnnnnnnnnnnnnnnnnnnnnnnnnnnnnnnnnnnnnnnnnnnnnnnnnnnnnnnnnnnnnnnnnnnnnnnnnnnnnnnnnnnnnnnnnnnnnnnnnnnnnnnnnnnnnnnnnnnnnnnnnnnnnnnnnnnnnnnnnnnnnnnnnnnnnnnnnnnnnnnnnnnnnnnnnnnnnnnnnnnnnnnnnnnnnnnnnnnnnnnnnnnnnnnnnnnnnnnnnnnnnnnnnnnnnnnnnnnnnnnnnnnnnnnnnnnnnnnnnnnnnnnnnnnnnnnnnnnnnnnnnnnnnnnnnnnnnnnnnnnnnnnnnnnnnnnnnnnnnnnnnnnnnnnnnnnnnnnnnnnnnnnnnnnnnnnnnnnnnnnnnnnnnnnnnnnnnnnnnnnnnnnnnnnnnnnnnnnnnnnnnnnnnnnnnnnnnnnnnnnnnnnnnnnnnnnnnnnnnnnnnnnnnnnnnnnnnnnnnnnnnnnnnnnnnnnnnnnnnnnnnnnnnnnnnnnnnnnnnnnnnnnnnnnnnnnnnnnnnnnnnnnnnnnnnnnnnnnnnnnnnnnnnnnnnnnnnnnnnnnnnnnnnnnnnnnnnnnnnnnnnnnnnnnnnnnnnnnnnnnnnnnnnnnnnnnnnnnnnnnnnnnnnnnnnnnnnnnnnnnnnnnnnnnnnnnnnnnnnnnnnnnnnnnnnnnnnnnnnnnnnnnnnnnnnnnnnnnnnnnnnnnnnnnnnnnnnnnnnnnnnnnnnnnnnnnnnnnnnnnnnnnnnnnnnnnnnnnnnnnnnnnnnnnnnnnnnnnnnnnnnnnnnnnnnnnnnnnnnnnnnnnnnnnnnnnnnnnnnnnnnnnnnnnnnnnnnnnnnnnnnnnnnnnnnnnnnnnnnnnnnnnnnnnnnnnnnnnnnnnnnnnnnnnnnnnnnnnnnnnnnnnnnnnnnnnnnnnnnnnnnnnnnnnnnnnnnnnnnnnnnnnnnnnnnnnnnnnnnnnnnnnnnnnnnnnnnnnnnnnnnnnnnnnnnnnnnnnnnnnnnnnnnnnnnnnnnnnnnnnnnnnnnnnnnnnnnnnnnnnnnnnnnnnnnnnnnnnnnnnnnnnnnnnnnnnnnnnnnnnnnnnnnnnnnnnnnnnnnnnnnnnnnnnnnnnnnnnnnnnnnnnnnnnnnnnnnnnnnnnnnnnnnnnnnnnnnnnnnnnnnnnnnnnnnnnnnnnnnnnnnnnnnnnnnnnnnnnnnnnnnnnnnnnnnnnnnnnnnnnnnnnnnnnnnnnnnnnnnnnnnnnnnnnnnnnnnnnnnnnnnnnnnnnnnnnnnnnnnnnnnnnnnnnnnnnnnnnnnnnnnnnnnnnnnnnnnnnnnnnnnnnnnnnnnnnnnnnnnnnnnnnnnnnnnnnnnnnnnnnnnnnnnnnnnnnnnnnnnnnnnnnnnnnnnnnnnnnnnnnnnnnnnnnnnnnnnnnnnnnnnnnnnnnnnnnnnnnnnnnnnnnnnnnnnnnnnnnnnnnnnnnnnnnnnnnnnnnnnnnnnnnnnnnnnnnnnnnnnnnnnnnnnnnnnnnnnnnnnnnnnnnnnnnnnnnnnnnnnnnnnnnnnnnnnnnnnnnnnnnnnnnnnnnnnnnnnnnnnnnnnnnnnnnnnnnnnnnnnnnnnnnnnnnnnnnnnnnnnnnnnnnnnnnnnnnnnnnnnnnnnnnnnnnnnnnnnnnnnnnnnnnnnnnnnnnnnnnnnnnnnnnnnnnnnnnnnnnnnnnnnnnnnnnnnnnnnnnnnnnnnnnnnnnnnnnnnnnnnnnnnnnnnnnnnnnnnnnnnnnnnnnnnnnnnnnnnnnnnnnnnnnnnnnnnnnnnnnnnnnnnnnnnnnnnnnnnnnnnnnnnnnnnnnnnnnnnnnnnnnnnnnnnnnnnnnnnnnnnnnnnnnnnnnnnnnnnnnnnnnnnnnnnnnnnnnnnnnnnnnnnnnnnnnnnnnnnnnnnnnnnnnnnnnnnnnnnnnnnnnnnnnnnnnnnnnnnnnnnnnnnnnnnnnnnnnnnnnnnnnnnnnnnnnnnnnnnnnnnnnnnnnnnnnnnnnnnnnnnnnnnnnnnnnnnnnnnnnnnnnnnnnnnnnnnnnnnnnnnnnnnnnnnnnnnnnnnnnnnnnnnnnnnnnnnnnnnnnnnnnnnnnnnnnnnnnnnnnnnnnnnnnnnnnnnnnnnnnnnnnnnnnnnnnnnnnnnnnnnnnnnnnnnnnnnnnnnnnnnnnnnnnnnnnnnnnnnnnnnnnnnnnnnnnnnnnnnnnnnnnnnnnnnnnnnnnnnnnnnnnnnnnnnnnnnnnnnnnnnnnnnnnnnnnnnnnnnnnnnnnnnnnnnnnnnnnnnnnnnnnnnnnnnnnnnnnnnnnnnnnnnnnnnnnnnnnnnnnnnnnnnnnnnnnnnnnnnnnnnnnnnnnnnnnnnnnnnnnnnnnnnnnnnnnnnnnnnnnnnnnnnnnnnnnnnnnnnnnnnnnnnnnnnnnnnnnnnnnnnnnnnnnnnnnnnnnnnnnnnnnnnnnnnnnnnnnnnnnnnnnnnnnnnnnnnnnnnnnnnnnnnnnnnnnnnnnnnnnnnnnnnnnnnnnnnnnnnnnnnnnnnnnnnnnnnnnnnnnnnnnnnnnnnnnnnnnnnnnnnnnnnnnnnnnnnnnnnnnnnnnnnnnnnnnnnnnnnnnnnnnnnnnnnnnnnnnnnnnnnnnnnnnnnnnnnnnnnnnnnnnnnnnnnnnnnnnnnnnnnnnnnnnnnnnnnnnnnnnnnnnnnnnnnnnnnnnnnnnnnnnnnnnnnnnnnnnnnnnnnnnnnnnnnnnnnnnnnnnnnnnnnnnnnnnnnnnnnnnnnnnnnnnnnnnnnnnnnnnnnnnnnnnnnnnnnnnnnnnnnnnnnnnnnnnnnnnnnnnnnnnnnnnnnnnnnnnnnnnnnnnnnnnnnnnnnnnnnnnnnnnnnnnnnnnnnnnnnnnnnnnnnnnnnnnnnnnnnnnnnnnnnnnnnnnnnnnnnnnnnnnnnnnnnnnnnnnnnnnnnnnnnnnnnnnnnnnnnnnnnnnnnnnnnnnnnnnnnnnnnnnnnnnnnnnnnnnnnnnnnnnnnnnnnnnnnnnnnnnnnnnnnnnnnnnnnnnnnnnnnnnnnnnnnnnnnnnnnnnnnnnnnnnnnnnnnnnnnnnnnnnnnnnnnnnnnnnnnnnnnnnnnnnnnnnnnnnnnnnnnnnnnnnnnnnnnnnnnnnnnnnnnnnnnnnnnnnnnnnnnnnnnnnnnnnnnnnnnnnnnnnnnnnnnnnnnnnnnnnnnnnnnnnnnnnnnnnnnnnnnnnnnnnnnnnnnnnnnnnnnnnnnnnnnnnnnnnnnnnnnnnnnnnnnnnnnnnnnnnnnnnnnnnnnnnnnnnnnnnnnnnnnnnnnnnnnnnnnnnnnnnnnnnnnnnnnnnnnnnnnnnnnnnnnnnnnnnnnnnnnnnnnnnnnnnnnnnnnnnnnnnnnnnnnnnnnnnnnnnnnnnnnnnnnnnnnnnnnnnnnnnnnnnnnnnnnnnnnnnnnnnnnnnnnnnnnnnnnnnnnnnnnnnnnnnnnnnnnnnnnnnnnnnnnnnnnnnnnnnnnnnnnnnnnnnnnnnnnnnnnnnnnnnnnnnnnnnnnnnnnnnnnnnnnnnnnnnnnnnnnnnnnnnnnnnnnnnnnnnnnnnnnnnnnnnnnnnnnnnnnnnnnnnnnnnnnnnnnnnnnnnnnnnnnnnnnnnnnnnnnnnnnnnnnnnnnnnnnnnnnnnnnnnnnnnnnnnnnnnnnnnnnnnnnnnnnnnnnnnnnnnnnnnnnnnnnnnnnnnnnnnnnnnnnnnnnnnnnnnnnnnnnnnnnnnnnnnnnnnnnnnnnnnnnnnnnnnnnnnnnnnnnnnnnnnnnnnnnnnnnnnnnnnnnnnnnnnnnnnnnnnnnnnnnnnnnnnnnnnnnnnnnnnnnnnnnnnnnnnnnnnnnnnnnnnnnnnnnnnnnnnnnnnnnnnnnnnnnnnnnnnnnnnnnnnnnnnnnnnnnnnnnnnnnnnnnnnnnnnnnnnnnnnnnnnnnnnnnnnnnnnnnnnnnnnnnnnnnnnnnnnnnnnnnnnnnnnnnnnnnnnnnnnnnnnnnnnnnnnnnnnnnnnnnnnnnnnnnnnnnnnnnnnnnnnnnnnnnnnnnnnnnnnnnnnnnnnnnnnnnnnnnnnnnnnnnnnnnnnnnnnnnnnnnnnnnnnnnnnnnnnnnnnnnnnnnnnnnnnnnnnnnnnnnnnnnnnnnnnnnnnnnnnnnnnnnnnnnnnnnnnnnnnnnnnnnnnnnnnnnnnnnnnnnnnnnnnnnnnnnnnnnnnnnnnnnnnnnnnnnnnnnnnnnnnnnnnnnnnnnnnnnnnnnnnnnnnnnnnnnnnnnnnnnnnnnnnnnnnnnnnnnnnnnnnnnnnnnnnnnnnnnnnnnnnnnnnnnnnnnnnnnnnnnnnnnnnnnnnnnnnnnnnnnnnnnnnnnnnnnnnnnnnnnnnnnnnnnnnnnnnnnnnnnnnnnnnnnnnnnnnnnnnnnnnnnnnnnnnnnnnnnnnnnnnnnnnnnnnnnnnnnnnnnnnnnnnnnnnnnnnnnnnnnnnnnnnnnnnnnnnnnnnnnnnnnnnnnnnnnnnnnnnnnnnnnnnnnnnnnnnnnnnnnnnnnnnnnnnnnnnnnnnnnnnnnnnnnnnnnnnnnnnnnnnnnnnnnnnnnnnnnnnnnnnnnnnnnnnnnnnnnnnnnnnnnnnnnnnnnnnnnnnnnnnnnnnnnnnnnnnnnnnnnnnnnnnnnnnnnnnnnnnnnnnnnnnnnnnnnnnnnnnnnnnnnnnnnnnnnnnnnnnnnnnnnnnnnnnnnnnnnnnnnnnnnnnnnnnnnnnnnnnnnnnnnnnnnnnnnnnnnnnnnnnnnnnnnnnnnnnnnnnnnnnnnnnnnnnnnnnnnnnnnnnnnnnnnnnnnnnnnnnnnnnnnnnnnnnnnnnnnnnnnnnnnnnnnnnnnnnnnnnnnnnnnnnnnnnnnnnnnnnnnnnnnnnnnnnnnnnnnnnnnnnnnnnnnnnnnnnnnnnnnnnnnnnnnnnnnnnnnnnnnnnnnnnnnnnnnnnnnnnnnnnnnnnnnnnnnnnnnnnnnnnnnnnnnnnnnnnnnnnnnnnnnnnnnnnnnnnnnnnnnnnnnnnnnnnnnnnnnnnnnnnnnnnnnnnnnnnnnnnnnnnnnnnnnnnnnnnnnnnnnnnnnnnnnnnnnnnnnnnnnnnnnnnnnnnnnnnnnnnnnnnnnnnnnnnnnnnnnnnnnnnnnnnnnnnnnnnnnnnnnnnnnnnnnnnnnnnnnnnnnnnnnnnnnnnnnnnnnnnnnnnnnnnnnnnnnnnnnnnnnnnnnnnnnnnnnnnnnnnnnnnnnnnnnnnnnnnnnnnnnnnnnnnnnnnnnnnnnnnnnnnnnnnnnnnnnnnnnnnnnnnnnnnnnnnnnnnnnnnnnnnnnnnnnnnnnnnnnnnnnnnnnnnnnnnnnnnnnnnnnnnnnnnnnnnnnnnnnnnnnnnnnnnnnnnnnnnnnnnnnnnnnnnnnnnnnnnnnnnnnnnnnnnnnnnnnnnnnnnnnnnnnnnnnnnnnnnnnnnnnnnnnnnnnnnnnnnnnnnnnnnnnnnnnnnnnnnnnnnnnnnnnnnnnnnnnnnnnnnnnnnnnnnnnnnnnnnnnnnnnnnnnnnnnnnnnnnnnnnnnnnnnnnnnnnnnnnnnnnnnnnnnnnnnnnnnnnnnnnnnnnnnnnnnnnnnnnnnnnnnnnnnnnnnnnnnnnnnnnnnnnnnnnnnnnnnnnnnnnnnnnnnnnnnnnnnnnnnnnnnnnnnnnnnnnnnnnnnnnnnnnnnnnnnnnnnnnnnnnnnnnnnnnnnnnnnnnnnnnnnnnnnnnnnnnnnnnnnnnnnnnnnnnnnnnnnnnnnnnnnnnnnnnnnnnnnnnnnnnnnnnnnnnnnnnnnnnnnnnnnnnnnnnnnnnnnnnnnnnnnnnnnnnnnnnnnnnnnnnnnnnnnnnnnnnnnnnnnnnnnnnnnnnnnnnnnnnnnnnnnnnnnnnnnnnnnnnnnnnnnnnnnnnnnnnnnnnnnnnnnnnnnnnnnnnnnnnnnnnnnnnnnnnnnnnnnnnnnnnnnnnnnnnnnnnnnnnnnnnnnnnnnnnnnnnnnnnnnnnnnnnnnnnnnnnnnnnnnnnnnnnnnnnnnnnnnnnnnnnnnnnnnnnnnnnnnnnnnnnnnnnnnnnnnnnnnnnnnnnnnnnnnnnnnnnnnnnnnnnnnnnnnnnnnnnnnnnnnnnnnnnnnnnnnnnnnnnnnnnnnnnnnnnnnnnnnnnnnnnnnnnnnnnnnnnnnnnnnnnnnnnnnnnnnnnnnnnnnnnnnnnnnnnnnnnnnnnnnnnnnnnnnnnnnnnnnnnnnnnnnnnnnnnnnnnnnnnnnnnnnnnnnnnnnnnnnnnnnnnnnnnnnnnnnnnnnnnnnnnnnnnnnnnnnnnnnnnnnnnnnnnnnnnnnnnnnnnnnnnnnnnnnnnnnnnnnnnnnnnnnnnnnnnnnnnnnnnnnnnnnnnnnnnnnnnnnnnnnnnnnnnnnnnnnnnnnnnnnnnnnnnnnnnnnnnnnnnnnnnnnnnnnnnnnnnnnnnnnnnnnnnnnnnnnnnnnnnnnnnnnnnnnnnnnnnnnnnnnnnnnnnnnnnnnnnnnnnnnnnnnnnnnnnnnnnnnnnnnnnnnnnnnnnnnnnnnnnnnnnnnnnnnnnnnnnnnnnnnnnnnnnnnnnnnnnnnnnnnnnnnnnnnnnnnnnnnnnnnnnnnnnnnnnnnnnnnnnnnnnnnnnnnnnnnnnnnnnnnnnnnnnnnnnnnnnnnnnnnnnnnnnnnnnnnnnnnnnnnnnnnnnnnnnnnnnnnnnnnnnnnnnnnnnnnnnnnnnnnnnnnnnnnnnnnnnnnnnnnnnnnnnnnnnnnnnnnnnnnnnnnnnnnnnnnnnnnnnnnnnnnnnnnnnnnnnnnnnnnnnnnnnnnnnnnnnnnnnnnnnnnnnnnnnnnnnnnnnnnnnnnnnnnnnnnnnnnnnnnnnnnnnnnnnnnnnnnnnnnnnnnnnnnnnnnnnnnnnnnnnnnnnnnnnnnnnnnnnnnnnnnnnnnnnnnnnnnnnnnnnnnnnnnnnnnnnnnnnnnnnnnnnnnnnnnnnnnnnnnnnnnnnnnnnnnnnnnnnnnnnnnnnnnnnnnnnnnnnnnnnnnnnnnnnnnnnnnnnnnnnnnnnnnnnnnnnnnnnnnnnnnnnnnnnnnnnnnnnnnnnnnnnnnnnnnnnnnnnnnnnnnnnnnnnnnnnnnnnnnnnnnnnnnnnnnnnnnnnnnnnnnnnnnnnnnnnnnnnnnnnnnnnnnnnnnnnnnnnnnnnnnnnnnnnnnnnnnnnnnnnnnnnnnnnnnnnnnnnnnnnnnnnnnnnnnnnnnnnnnnnnnnnnnnnnnnnnnnnnnnnnnnnnnnnnnnnnnnnnnnnnnnnnnnnnnnnnnnnnnnnnnnnnnnnnnnnnnnnnnnnnnnnnnnnnnnnnnnnnnnnnnnnnnnnnnnnnnnnnnnnnnnnnnnnnnnnnnnnnnnnnnnnnnnnnnnnnnnnnnnnnnnnnnnnnnnnnnnnnnnnnnnnnnnnnnnnnnnnnnnnnnnnnnnnnnnnnnnnnnnnnnnnnnnnnnnnnnnnnnnnnnnnnnnnnnnnnnnnnnnnnnnnnnnnnnnnnnnnnnnnnnnnnnnnnnnnnnnnnnnnnnnnnnnnnnnnnnnnnnnnnnnnnnnnnnnnnnnnnnnnnnnnnnnnnnnnnnnnnnnnnnnnnnnnnnnnnnnnnnnnnnnnnnnnnnnnnnnnnnnnnnnnnnnnnnnnnnnnnnnnnnnnnnnnnnnnnnnnnnnnnnnnnnnnnnnnnnnnnnnnnnnnnnnnnnnnnnnnnnnnnnnnnnnnnnnnnnnnnnnnnnnnnnnnnnnnnnnnnnnnnnnnnnnnnnnnnnnnnnnnnnnnnnnnnnnnnnnnnnnnnnnnnnnnnnnnnnnnnnnnnnnnnnnnnnnnnnnnnnnnnnnnnnnnnnnnnnnnnnnnnnnnnnnnnnnnnnnnnnnnnnnnnnnnnnnnnnnnnnnnnnnnnnnnnnnnnnnnnnnnnnnnnnnnnnnnnnnnnnnnnnnnnnnnnnnnnnnnnnnnnnnnnnnnnnnnnnnnnnnnnnnnnnnnnnnnnnnnnnnnnnnnnnnnnnnnnnnnnnnnnnnnnnnnnnnnnnnnnnnnnnnnnnnnnnnnnnnnnnnnnnnnnnnnnnnnnnnnnnnnnnnnnnnnnnnnnnnnnnnnnnnnnnnnnnnnnnnnnnnnnnnnnnnnnnnnnnnnnnnnnnnnnnnnnnnnnnnnnnnnnnnnnnnnnnnnnnnnnnnnnnnnnnnnnnnnnnnnnnnnnnnnnnnnnnnnnnnnnnnnnnnnnnnnnnnnnnnnnnnnnnnnnnnnnnnnnnnnnnnnnnnnnnnnnnnnnnnnnnnnnnnnnnnnnnnnnnnnnnnnnnnnnnnnnnnnnnnnnnnnnnnnnnnnnnnnnnnnnnnnnnnnnnnnnnnnnnnnnnnnnnnnnnnnnnnnnnnnnnnnnnnnnnnnnnnnnnnnnnnnnnnnnnnnnnnnnnnnnnnnnnnnnnnnnnnnnnnnnnnnnnnnnnnnnnnnnnnnnnnnnnnnnnnnnnnnnnnnnnnnnnnnnnnnnnnnnnnnnnnnnnnnnnnnnnnnnnnnnnnnnnnnnnnnnnnnnnnnnnnnnnnnnnnnnnnnnnnnnnnnnnnnnnnnnnnnnnnnnnnnnnnnnnnnnnnnnnnnnnnnnnnnnnnnnnnnnnnnnnnnnnnnnnnnnnnnnnnnnnnnnnnnnnnnnnnnnnnnnnnnnnnnnnnnnnnnnnnnnnnnnnnnnnnnnnnnnnnnnnnnnnnnnnnnnnnnnnnnnnnnnnnnnnnnnnnnnnnnnnnnnnnnnnnnnnnnnnnnnnnnnnnnnnnnnnnnnnnnnnnnnnnnnnnnnnnnnnnnnnnnnnnnnnnnnnnnnnnnnnnnnnnnnnnnnnnnnnnnnnnnnnnnnnnnnnnnnnnnnnnnnnnnnnnnnnnnnnnnnnnnnnnnnnnnnnnnnnnnnnnnnnnnnnnnnnnnnnnnnnnnnnnnnnnnnnnnnnnnnnnnnnnnnnnnnnnnnnnnnnnnnnnnnnnnnnnnnnnnnnnnnnnnnnnnnnnnnnnnnnnnnnnnnnnnnnnnnnnnnnnnnnnnnnnnnnnnnnnnnnnnnnnnnnnnnnnnnnnnnnnnnnnnnnnnnnnnnnnnnnnnnnnnnnnnnnnnnnnnnnnnnnnnnnnnnnnnnnnnnnnnnnnnnnnnnnnnnnnnnnnnnnnnnnnnnnnnnnnnnnnnnnnnnnnnnnnnnnnnnnnnnnnnnnnnnnnnnnnnnnnnnnnnnnnnnnnnnnnnnnnnnnnnnnnnnnnnnnnnnnnnnnnnnnnnnnnnnnnnnnnnnnnnnnnnnnnnnnnnnnnnnnnnnnnnnnnnnnnnnnnnnnnnnnnnnnnnnnnnnnnnnnnnnnnnnnnnnnnnnnnnnnnnnnnnnnnnnnnnnnnnnnnnnnnnnnnnnnnnnnnnnnnnnnnnnnnnnnnnnnnnnnnnnnnnnnnnnnnnnnnnnnnnnnnnnnnnnnnnnnnnnnnnnnnnnnnnnnnnnnnnnnnnnnnnnnnnnnnnnnnnnnnnnnnnnnnnnnnnnnnnnnnnnnnnnnnnnnnnnnnnnnnnnnnnnnnnnnnnnnnnnnnnnnnnnnnnnnnnnnnnnnnnnnnnnnnnnnnnnnnnnnnnnnnnnnnnnnnnnnnnnnnnnnnnnnnnnnnnnnnnnnnnnnnnnnnnnnnnnnnnnnnnnnnnnnnnnnnnnnnnnnnnnnnnnnnnnnnnnnnnnnnnnnnnnnnnnnnnnnnnnnnnnnnnnnnnnnnnnnnnnnnnnnnnnnnnnnnnnnnnnnnnnnnnnnnnnnnnnnnnnnnnnnnnnnnnnnnnnnnnnnnnnnnnnnnnnnnnnnnnnnnnnnnnnnnnnnnnnnnnnnnnnnnnnnnnnnnnnnnnnnnnnnnnnnnnnnnnnnnnnnnnnnnnnnnnnnnnnnnnnnnnnnnnnnnnnnnnnnnnnnnnnnnnnnnnnnnnnnnnnnnnnnnnnnnnnnnnnnnnnnnnnnnnnnnnnnnnnnnnnnnnnnnnnnnnnnnnnnnnnnnnnnnnnnnnnnnnnnnnnnnnnnnnnnnnnnnnnnnnnnnnnnnnnnnnnnnnnnnnnnnnnnnnnnnnnnnnnnnnnnnnnnnnnnnnnnnnnnnnnnnnnnnnnnnnnnnnnnnnnnnnnnnnnnnnnnnnnnnnnnnnnnnnnnnnnnnnnnnnnnnnnnnnnnnnnnnnnnnnnnnnnnnnnnnnnnnnnnnnnnnnnnnnnnnnnnnnnnnnnnnnnnnnnnnnnnnnnnnnnnnnnnnnnnnnnnnnnnnnnnnnnnnnnnnnnnnnnnnnnnnnnnnnnnnnnnnnnnnnnnnnnnnnnnnnnnnnnnnnnnnnnnnnnnnnnnnnnnnnnnnnnnnnnnnnnnnnnnnnnnnnnnnnnnnnnnnnnnnnnnnnnnnnnnnnnnnnnnnnnnnnnnnnnnnnnnnnnnnnnnnnnnnnnnnnnnnnnnnnnnnnnnnnnnnnnnnnnnnnnnnnnnnnnnnnnnnnnnnnnnnnnnnnnnnnnnnnnnnnnnnnnnnnnnnnnnnnnnnnnnnnnnnnnnnnnnnnnnnnnnnnnnnnnnnnnnnnnnnnnnnnnnnnnnnnnnnnnnnnnnnnnnnnnnnnnnnnnnnnnnnnnnnnnnnnnnnnnnnnnnnnnnnnnnnnnnnnnnnnnnnnnnnnnnnnnnnnnnnnnnnnnnnnnnnnnnnnnnnnnnnnnnnnnnnnnnnnnnnnnnnnnnnnnnnnnnnnnnnnnnnnnnnnnnnnnnnnnnnnnnnnnnnnnnnnnnnnnnnnnnnnnnnnnnnnnnnnnnnnnnnnnnnnnnnnnnnnnnnnnnnnnnnnnnnnnnnnnnnnnnnnnnnnnnnnnnnnnnnnnnnnnnnnnnnnnnnnnnnnnnnnnnnnnnnnnnnnnnnnnnnnnnnnnnnnnnnnnnnnnnnnnnnnnnnnnnnnnnnnnnnnnnnnnnnnnnnnnnnnnnnnnnnnnnnnnnnnnnnnnnnnnnnnnnnnnnnnnnnnnnnnnnnnnnnnnnnnnnnnnnnnnnnnnnnnnnnnnnnnnnnnnnnnnnnnnnnnnnnnnnnnnnnnnnnnnnnnnnnnnnnnnnnnnnnnnnnnnnnnnnnnnnnnnnnnnnnnnnnnnnnnnnnnnnnnnnnnnnnnnnnnnnnnnnnnnnnnnnnnnnnnnnnnnnnnnnnnnnnnnnnnnnnnnnnnnnnnnnnnnnnnnnnnnnnnnnnnnnnnnnnnnnnnnnnnnnnnnnnnnnnnnnnnnnnnnnnnnnnnnnnnnnnnnnnnnnnnnnnnnnnnnnnnnnnnnnnnnnnnnnnnnnnnnnnnnnnnnnnnnnnnnnnnnnnnnnnnnnnnnnnnnnnnnnnnnnnnnnnnnnnnnnnnnnnnnnnnnnnnnnnnnnnnnnnnnnnnnnnnnnnnnnnnnnnnnnnnnnnnnnnnnnnnnnnnnnnnnnnnnnnnnnnnnnnnnnnnnnnnnnnnnnnnnnnnnnnnnnnnnnnnnnnnnnnnnnnnnnnnnnnnnnnnnnnnnnnnnnnnnnnnnnnnnnnnnnnnnnnnnnnnnnnnnnnnnnnnnnnnnnnnnnnnnnnnnnnnnnnnnnnnnnnnnnnnnnnnnnnnnnnnnnnnnnnnnnnnnnnnnnnnnnnnnnnnnnnnnnnnnnnnnnnnnnnnnnnnnnnnnnnnnnnnnnnnnnnnnnnnnnnnnnnnnnnnnnnnnnnnnnnnnnnnnnnnnnnnnnnnnnnnnnnnnnnnnnnnnnnnnnnnnnnnnnnnnnnnnnnnnnnnnnnnnnnnnnnnnnnnnnnnnnnnnnnnnnnnnnnnnnnnnnnnnnnnnnnnnnnnnnnnnnnnnnnnnnnnnnnnnnnnnnnnnnnnnnnnnnnnnnnnnnnnnnnnnnnnnnnnnnnnnnnnnnnnnnnnnnnnnnnnnnnnnnnnnnnnnnnnnnnnnnnnnnnnnnnnnnnnnnnnnnnnnnnnnnnnnnnnnnnnnnnnnnnnnnnnnnnnnnnnnnnnnnnnnnnnnnnnnnnnnnnnnnnnnnnnnnnnnnnnnnnnnnnnnnnnnnnnnnnnnnnnnnnnnnnnnnnnnnnnnnnnnnnnnnnnnnnnnnnnnnnnnnnnnnnnnnnnnnnnnnnnnnnnnnnnnnnnnnnnnnnnnnnnnnnnnnnnnnnnnnnnnnnnnnnnnnnnnnnnnnnnnnnnnnnnnnnnnnnnnnnnnnnnnnnnnnnnnnnnnnnnnnnnnnnnnnnnnnnnnnnnnnnnnnnnnnnnnnnnnnnnnnnnnnnnnnnnnnnnnnnnnnnnnnnnnnnnnnnnnnnnnnnnnnnnnnnnnnnnnnnnnnnnnnnnnnnnnnnnnnnnnnnnnnnnnnnnnnnnnnnnnnnnnnnnnnnnnnnnnnnnnnnnnnnnnnnnnnnnnnnnnnnnnnnnnnnnnnnnnnnnnnnnnnnnnnnnnnnnnnnnnnnnnnnnnnnnnnnnnnnnnnnnnnnnnnnnnnnnnnnnnnnnnnnnnnnnnnnnnnnnnnnnnnnnnnnnnnnnnnnnnnnnnnnnnnnnnnnnnnnnnnnnnnnnnnnnnnnnnnnnnnnnnnnnnnnnnnnnnnnnnnnnnnnnnnnnnnnnnnnnnnnnnnnnnnnnnnnnnnnnnnnnnnnnnnnnnnnnnnnnnnnnnnnnnnnnnnnnnnnnnnnnnnnnnnnnnnnnnnnnnnnnnnnnnnnnnnnnnnnnnnnnnnnnnnnnnnnnnnnnnnnnnnnnnnnnnnnnnnnnnnnnnnnnnnnnnnnnnnnnnnnnnnnnnnnnnnnnnnnnnnnnnnnnnnnnnnnnnnnnnnnnnnnnnnnnnnnnnnnnnnnnnnnnnnnnnnnnnnnnnnnnnnnnnnnnnnnnnnnnnnnnnnnnnnnnnnnnnnnnnnnnnnnnnnnnnnnnnnnnnnnnnnnnnnnnnnnnnnnnnnnnnnnnnnnnnnnnnnnnnnnnnnnnnnnnnnnnnnnnnnnnnnnnnnnnnnnnnnnnnnnnnnnnnnnnnnnnnnnnnnnnnnnnnnnnnnnnnnnnnnnnnnnnnnnnnnnnnnnnnnnnnnnnnnnnnnnnnnnnnnnnnnnnnnnnnnnnnnnnnnnnnnnnnnnnnnnnnnnnnnnnnnnnnnnnnnnnnnnnnnnnnnnnnnnnnnnnnnnnnnnnnnnnnnnnnnnnnnnnnnnnnnnnnnnnnnnnnnnnnnnnnnnnnnnnnnnnnnnnnnnnnnnnnnnnnnnnnnnnnnnnnnnnnnnnnnnnnnnnnnnnnnnnnnnnnnnnnnnnnnnnnnnnnnnnnnnnnnnnnnnnnnnnnnnnnnnnnnnnnnnnnnnnnnnnnnnnnnnnnnnnnnnnnnnnnnnnnnnnnnnnnnnnnnnnnnnnnnnnnnnnnnnnnnnnnnnnnnnnnnnnnnnnnnnnnnnnnnnnnnnnnnnnnnnnnnnnnnnnnnnnnnnnnnnnnnnnnnnnnnnnnnnnnnnnnnnnnnnnnnnnnnnnnnnnnnnnnnnnnnnnnnnnnnnnnnnnnnnnnnnnnnnnnnnnnnnnnnnnnnnnnnnnnnnnnnnnnnnnnnnnnnnnnnnnnnnnnnnnnnnnnnnnnnnnnnnnnnnnnnnnnnnnnnnnnnnnnnnnnnnnnnnnnnnnnnnnnnnnnnnnnnnnnnnnnnnnnnnnnnnnnnnnnnnnnnnnnnnnnnnnnnnnnnnnnnnnnnnnnnnnnnnnnnnnnnnnnnnnnnnnnnnnnnnnnnnnnnnnnnnnnnnnnnnnnnnnnnnnnnnnnnnnnnnnnnnnnnnnnnnnnnnnnnnnnnnnnnnnnnnnnnnnnnnnnnnnnnnnnnnnnnnnnnnnnnnnnnnnnnnnnnnnnnnnnnnnnnnnnnnnnnnnnnnnnnnnnnnnnnnnnnnnnnnnnnnnnnnnnnnnnnnnnnnnnnnnnnnnnnnnnnnnnnnnnnnnnnnnnnnnnnnnnnnnnnnnnnnnnnnnnnnnnnnnnnnnnnnnnnnnnnnnnnnnnnnnnnnnnnnnnnnnnnnnnnnnnnnnnnnnnnnnnnnnnnnnnnnnnnnnnnnnnnnnnnnnnnnnnnnnnnnnnnnnnnnnnnnnnnnnnnnnnnnnnnnnnnnnnnnnnnnnnnnnnnnnnnnnnnnnnnnnnnnnnnnnnnnnnnnnnnnnnnnnnnnnnnnnnnnnnnnnnnnnnnnnnnnnnnnnnnnnnnnnnnnnnnnnnnnnnnnnnnnnnnnnnnnnnnnnnnnnnnnnnnnnnnnnnnnnnnnnnnnnnnnnnnnnnnnnnnnnnnnnnnnnnnnnnnnnnnnnnnnnnnnnnnnnnnnnnnnnnnnnnnnnnnnnnnnnnnnnnnnnnnnnnnnnnnnnnnnnnnnnnnnnnnnnnnnnnnnnnnnnnnnnnnnnnnnnnnnnnnnnnnnnnnnnnnnnnnnnnnnnnnnnnnnnnnnnnnnnnnnnnnnnnnnnnnnnnnnnnnnnnnnnnnnnnnnnnnnnnnnnnnnnnnnnnnnnnnnnnnnnnnnnnnnnnnnnnnnnnnnnnnnnnnnnnnnnnnnnnnnnnnnnnnnnnnnnnnnnnnnnnnnnnnnnnnnnnnnnnnnnnnnnnnnnnnnnnnnnnnnnnnnnnnnnnnnnnnnnnnnnnnnnnnnnnnnnnnnnnnnnnnnnnnnnnnnnnnnnnnnnnnnnnnnnnnnnnnnnnnnnnnnnnnnnnnnnnnnnnnnnnnnnnnnnnnnnnnnnnnnnnnnnnnnnnnnnnnnnnnnnnnnnnnnnnnnnnnnnnnnnnnnnnnnnnnnnnnnnnnnnnnnnnnnnnnnnnnnnnnnnnnnnnnnnnnnnnnnnnnnnnnnnnnnnnnnnnnnnnnnnnnnnnnnnnnnnnnnnnnnnnnnnnnnnnnnnnnnnnnnnnnnnnnnnnnnnnnnnnnnnnnnnnnnnnnnnnnnnnnnnnnnnnnnnnnnnnnnnnnnnnnnnnnnnnnnnnnnnnnnnnnnnnnnnnnnnnnnnnnnnnnnnnnnnnnnnnnnnnnnnnnnnnnnnnnnnnnnnnnnnnnnnnnnnnnnnnnnnnnnnnnnnnnnnnnnnnnnnnnnnnnnnnnnnnnnnnnnnnnnnnnnnnnnnnnnnnnnnnnnnnnnnnnnnnnnnnnnnnnnnnnnnnnnnnnnnnnnnnnnnnnnnnnnnnnnnnnnnnnnnnnnnnnnnnnnnnnnnnnnnnnnnnnnnnnnnnnnnnnnnnnnnnnnnnnnnnnnnnnnnnnnnnnnnnnnnnnnnnnnnnnnnnnnnnnnnnnnnnnnnnnnnnnnnnnnnnnnnnnnnnnnnnnnnnnnnnnnnnnnnnnnnnnnnnnnnnnnnnnnnnnnnnnnnnnnnnnnnnnnnnnnnnnnnnnnnnnnnnnnnnnnnnnnnnnnnnnnnnnnnnnnnnnnnnnnnnnnnnnnnnnnnnnnnnnnnnnnnnnnnnnnnnnnnnnnnnnnnnnnnnnnnnnnnnnnnnnnnnnnnnnnnnnnnnnnnnnnnnnnnnnnnnnnnnnnnnnnnnnnnnnnnnnnnnnnnnnnnnnnnnnnnnnnnnnnnnnnnnnnnnnnnnnnnnnnnnnnnnnnnnnnnnnnnnnnnnnnnnnnnnnnnnnnnnnnnnnnnnnnnnnnnnnnnnnnnnnnnnnnnnnnnnnnnnnnnnnnnnnnnnnnnnnnnnnnnnnnnnnnnnnnnnnnnnnnnnnnnnnnnnnnnnnnnnnnnnnnnnnnnnnnnnnnnnnnnnnnnnnnnnnnnnnnnnnnnnnnnnnnnnnnnnnnnnnnnnnnnnnnnnnnnnnnnnnnnnnnnnnnnnnnnnnnnnnnnnnnnnnnnnnnnnnnnnnnnnnnnnnnnnnnnnnnnnnnnnnnnnnnnnnnnnnnnnnnnnnnnnnnnnnnnnnnnnnnnnnnnnnnnnnnnnnnnnnnnnnnnnnnnnnnnnnnnnnnnnnnnnnnnnnnnnnnnnnnnnnnnnnnnnnnnnnnnnnnnnnnnnnnnnnnnnnnnnnnnnnnnnnnnnnnnnnnnnnnnnnnnnnnnnnnnnnnnnnnnnnnnnnnnnnnnnnnnnnnnnnnnnnnnnnnnnnnnnnnnnnnnnnnnnnnnnnnnnnnnnnnnnnnnnnnnnnnnnnnnnnnnnnnnnnnnnnnnnnnnnnnnnnnnnnnnnnnnnnnnnnnnnnnnnnnnnnnnnnnnnnnnnnnnnnnnnnnnnnnnnnnnnnnnnnnnnnnnnnnnnnnnnnnnnnnnnnnnnnnnnnnnnnnnnnnnnnnnnnnnnnnnnnnnnnnnnnnnnnnnnnnnnnnnnnnnnnnnnnnnnnnnnnnnnnnnnnnnnnnnnnnnnnnnnnnnnnnnnnnnnnnnnnnnnnnnnnnnnnnnnnnnnnnnnnnnnnnnnnnnnnnnnnnnnnnnnnnnnnnnnnnnnnnnnnnnnnnnnnnnnnnnnnnnnnnnnnnnnnnnnnnnnnnnnnnnnnnnnnnnnnnnnnnnnnnnnnnnnnnnnnnnnnnnnnnnnnnnnnnnnnnnnnnnnnnnnnnnnnnnnnnnnnnnnnnnnnnnnnnnnnnnnnnnnnnnnnnnnnnnnnnnnnnnnnnnnnnnnnnnnnnnnnnnnnnnnnnnnnnnnnnnnnnnnnnnnnnnnnnnnnnnnnnnnnnnnnnnnnnnnnnnnnnnnnnnnnnnnnnnnnnnnnnnnnnnnnnnnnnnnnnnnnnnnnnnnnnnnnnnnnnnnnnnnnnnnnnnnnnnnnnnnnnnnnnnnnnnnnnnnnnnnnnnnnnnnnnnnnnnnnnnnnnnnnnnnnnnnnnnnnnnnnnnnnnnnnnnnnnnnnnnnnnnnnnnnnnnnnnnnnnnnnnnnnnnnnnnnnnnnnnnnnnnnnnnnnnnnnnnnnnnnnnnnnnnnnnnnnnnnnnnnnnnnnnnnnnnnnnnnnnnnnnnnnnnnnnnnnnnnnnnnnnnnnnnnnnnnnnnnnnnnnnnnnnnnnnnnnnnnnnnnnnnnnnnnnnnnnnnnnnnnnnnnnnnnnnnnnnnnnnnnnnnnnnnnnnnnnnnnnnnnnnnnnnnnnnnnnnnnnnnnnnnnnnnnnnnnnnnnnnnnnnnnnnnnnnnnnnnnnnnnnnnnnnnnnnnnnnnnnnnnnnnnnnnnnnnnnnnnnnnnnnnnnnnnnnnnnnnnnnnnnnnnnnnnnnnnnnnnnnnnnnnnnnnnnnnnnnnnnnnnnnnnnnnnnnnnnnnnnnnnnnnnnnnnnnnnnnnnnnnnnnnnnnnnnnnnnnnnnnnnnnnnnnnnnnnnnnnnnnnnnnnnnnnnnnnnnnnnnnnnnnnnnnnnnnnnnnnnnnnnnnnnnnnnnnnnnnnnnnnnnnnnnnnnnnnnnnnnnnnnnnnnnnnnnnnnnnnnnnnnnnnnnnnnnnnnnnnnnnnnnnnnnnnnnnnnnnnnnnnnnnnnnnnnnnnnnnnnnnnnnnnnnnnnnnnnnnnnnnnnnnnnnnnnnnnnnnnnnnnnnnnnnnnnnnnnnnnnnnnnnnnnnnnnnnnnnnnnnnnnnnnnnnnnnnnnnnnnnnnnnnnnnnnnnnnnnnnnnnnnnnnnnnnnnnnnnnnnnnnnnnnnnnnnnnnnnnnnnnnnnnnnnnnnnnnnnnnnnnnnnnnnnnnnnnnnnnnnnnnnnnnnnnnnnnnnnnnnnnnnnnnnnnnnnnnnnnnnnnnnnnnnnnnnnnnnnnnnnnnnnnnnnnnnnnnnnnnnnnnnnnnnnnnnnnnnnnnnnnnnnnnnnnnnnnnnnnnnnnnnnnnnnnnnnnnnnnnnnnnnnnnnnnnnnnnnnnnnnnnnnnnnnnnnnnnnnnnnnnnnnnnnnnnnnnnnnnnnnnnnnnnnnnnnnnnnnnnnnnnnnnnnnnnnnnnnnnnnnnnnnnnnnnnnnnnnnnnnnnnnnnnnnnnnnnnnnnnnnnnnnnnnnnnnnnnnnnnnnnnnnnnnnnnnnnnnnnnnnnnnnnnnnnnnnnnnnnnnnnnnnnnnnnnnnnnnnnnnnnnnnnnnnnnnnnnnnnnnnnnnnnnnnnnnnnnnnnnnnnnnnnnnnnnnnnnnnnnnnnnnnnnnnnnnnnnnnnnnnnnnnnnnnnnnnnnnnnnnnnnnnnnnnnnnnnnnnnnnnnnnnnnnnnnnnnnnnnnnnnnnnnnnnnnnnnnnnnnnnnnnnnnnnnnnnnnnnnnnnnnnnnnnnnnnnnnnnnnnnnnnnnnnnnnnnnnnnnnnnnnnnnnnnnnnnnnnnnnnnnnnnnnnnnnnnnnnnnnnnnnnnnnnnnnnnnnnnnnnnnnnnnnnnnnnnnnnnnnnnnnnnnnnnnnnnnnnnnnnnnnnnnnnnnnnnnnnnnnnnnnnnnnnnnnnnnnnnnnnnnnnnnnnnnnnnnnnnnnnnnnnnnnnnnnnnnnnnnnnnnnnnnnnnnnnnnnnnnnnnnnnnnnnnnnnnnnnnnnnnnnnnnnnnnnnnnnnnnnnnnnnnnnnnnnnnnnnnnnnnnnnnnnnnnnnnnnnnnnnnnnnnnnnnnnnnnnnnnnnnnnnnnnnnnnnnnnnnnnnnnnnnnnnnnnnnnnnnnnnnnnnnnnnnnnnnnnnnnnnnnnnnnnnnnnnnnnnnnnnnnnnnnnnnnnnnnnnnnnnnnnnnnnnnnnnnnnnnnnnnnnnnnnnnnnnnnnnnnnnnnnnnnnnnnnnnnnnnnnnnnnnnnnnnnnnnnnnnnnnnnnnnnnnnnnnnnnnnnnnnnnnnnnnnnnnnnnnnnnnnnnnnnnnnnnnnnnnnnnnnnnnnnnnnnnnnnnnnnnnnnnnnnnnnnnnnnnnnnnnnnnnnnnnnnnnnnnnnnnnnnnnnnnnnnnnnnnnnnnnnnnnnnnnnnnnnnnnnnnnnnnnnnnnnnnnnnnnnnnnnnnnnnnnnnnnnnnnnnnnnnnnnnnnnnnnnnnnnnnnnnnnnnnnnnnnnnnnnnnnnnnnnnnnnnnnnnnnnnnnnnnnnnnnnnnnnnnnnnnnnnnnnnnnnnnnnnnnnnnnnnnnnnnnnnnnnnnnnnnnnnnnnnnnnnnnnnnnnnnnnnnnnnnnnnnnnnnnnnnnnnnnnnnnnnnnnnnnnnnnnnnnnnnnnnnnnnnnnnnnnnnnnnnnnnnnnnnnnnnnnnnnnnnnnnnnnnnnnnnnnnnnnnnnnnnnnnnnnnnnnnnnnnnnnnnnnnnnnnnnnnnnnnnnnnnnnnnnnnnnnnnnnnnnnnnnnnnnnnnnnnnnnnnnnnnnnnnnnnnnnnnnnnnnnnnnnnnnnnnnnnnnnnnnnnnnnnnnnnnnnnnnnnnnnnnnnnnnnnnnnnnnnnnnnnnnnnnnnnnnnnnnnnnnnnnnnnnnnnnnnnnnnnnnnnnnnnnnnnnnnnnnnnnnnnnnnnnnnnnnnnnnnnnnnnnnnnnnnnnnnnnnnnnnnnnnnnnnnnnnnnnnnnnnnnnnnnnnnnnnnnnnnnnnnnnnnnnnnnnnnnnnnnnnnnnnnnnnnnnnnnnnnnnnnnnnnnnnnnnnnnnnnnnnnnnnnnnnnnnnnnnnnnnnnnnnnnnnnnnnnnnnnnnnnnnnnnnnnnnnnnnnnnnnnnnnnnnnnnnnnnnnnnnnnnnnnnnnnnnnnnnnnnnnnnnnnnnnnnnnnnnnnnnnnnnnnnnnnnnnnnnnnnnnnnnnnnnnnnnnnnnnnnnnnnnnnnnnnnnnnnnnnnnnnnnnnnnnnnnnnnnnnnnnnnnnnnnnnnnnnnnnnnnnnnnnnnnnnnnnnnnnnnnnnnnnnnnnnnnnnnnnnnnnnnnnnnnnnnnnnnnnnnnnnnnnnnnnnnnnnnnnnnnnnnnnnnnnnnnnnnnnnnnnnnnnnnnnnnnnnnnnnnnnnnnnnnnnnnnnnnnnnnnnnnnnnnnnnnnnnnnnnnnnnnnnnnnnnnnnnnnnnnnnnnnnnnnnnnnnnnnnnnnnnnnnnnnnnnnnnnnnnnnnnnnnnnnnnnnnnnnnnnnnnnnnnnnnnnnnnnnnnnnnnnnnnnnnnnnnnnnnnnnnnnnnnnnnnnnnnnnnnnnnnnnnnnnnnnnnnnnnnnnnnnnnnnnnnnnnnnnnnnnnnnnnnnnnnnnnnnnnnnnnnnnnnnnnnnnnnnnnnnnnnnnnnnnnnnnnnnnnnnnnnnnnnnnnnnnnnnnnnnnnnnnnnnnnnnnnnnnnnnnnnnnnnnnnnnnnnnnnnnnnnnnnnnnnnnnnnnnnnnnnnnnnnnnnnnnnnnnnnnnnnnnnnnnnnnnnnnnnnnnnnnnnnnnnnnnnnnnnnnnnnnnnnnnnnnnnnnnnnnnnnnnnnnnnnnnnnnnnnnnnnnnnnnnnnnnnnnnnnnnnnnnnnnnnnnnnnnnnnnnnnnnnnnnnnnnnnnnnnnnnnnnnnnnnnnnnnnnnnnnnnnnnnnnnnnnnnnnnnnnnnnnnnnnnnnnnnnnnnnnnnnnnnnnnnnnnnnnnnnnnnnnnnnnnnnnnnnnnnnnnnnnnnnnnnnnnnnnnnnnnnnnnnnnnnnnnnnnnnnnnnnnnnnnnnnnnnnnnnnnnnnnnnnnnnnnnnnnnnnnnnnnnnnnnnnnnnnnnnnnnnnnnnnnnnnnnnnnnnnnnnnnnnnnnnnnnnnnnnnnnnnnnnnnnnnnnnnnnnnnnnnnnnnnnnnnnnnnnnnnnnnnnnnnnnnnnnnnnnnnnnnnnnnnnnnnnnnnnnnnnnnnnnnnnnnnnnnnnnnnnnnnnnnnnnnnnnnnnnnnnnnnnnnnnnnnnnnnnnnnnnnnnnnnnnnnnnnnnnnnnnnnnnnnnnnnnnnnnnnnnnnnnnnnnnnnnnnnnnnnnnnnnnnnnnnnnnnnnnnnnnnnnnnnnnnnnnnnnnnnnnnnnnnnnnnnnnnnnnnnnnnnnnnnnnnnnnnnnnnnnnnnnnnnnnnnnnnnnnnnnnnnnnnnnnnnnnnnnnnnnnnnnnnnnnnnnnnnnnnnnnnnnnnnnnnnnnnnnnnnnnnnnnnnnnnnnnnnnnnnnnnnnnnnnnnnnnnnnnnnnnnnnnnnnnnnnnnnnnnnnnnnnnnnnnnnnnnnnnnnnnnnnnnnnnnnnnnnnnnnnnnnnnnnnnnnnnnnnnnnnnnnnnnnnnnnnnnnnnnnnnnnnnnnnnnnnnnnnnnnnnnnnnnnnnnnnnnnnnnnnnnnnnnnnnnnnnnnnnnnnnnnnnnnnnnnnnnnnnnnnnnnnnnnnnnnnnnnnnnnnnnnnnnnnnnnnnnnnnnnnnnnnnnnnnnnnnnnnnnnnnnnnnnnnnnnnnnnnnnnnnnnnnnnnnnnnnnnnnnnnnnnnnnnnnnnnnnnnnnnnnnnnnnnnnnnnnnnnnnnnnnnnnnnnnnnnnnnnnnnnnnnnnnnnnnnnnnnnnnnnnnnnnnnnnnnnnnnnnnnnnnnnnnnnnnnnnnnnnnnnnnnnnnnnnnnnnnnnnnnnnnnnnnnnnnnnnnnnnnnnnnnnnnnnnnnnnnnnnnnnnnnnnnnnnnnnnnnnnnnnnnnnnnnnnnnnnnnnnnnnnnnnnnnnnnnnnnnnnnnnnnnnnnnnnnnnnnnnnnnnnnnnnnnnnnnnnnnnnnnnnnnnnnnnnnnnnnnnnnnnnnnnnnnnnnnnnnnnnnnnnnnnnnnnnnnnnnnnnnnnnnnnnnnnnnnnnnnnnnnnnnnnnnnnnnnnnnnnnnnnnnnnnnnnnnnnnnnnnnnnnnnnnnnnnnnnnnnnnnnnnnnnnnnnnnnnnnnnnnnnnnnnnnnnnnnnnnnnnnnnnnnnnnnnnnnnnnnnnnnnnnnnnnnnnnnnnnnnnnnnnnnnnnnnnnnnnnnnnnnnnnnnnnnnnnnnnnnnnnnnnnnnnnnnnnnnnnnnnnnnnnnnnnnnnnnnnnnnnnnnnnnnnnnnnnnnnnnnnnnnnnnnnnnnnnnnnnnnnnnnnnnnnnnnnnnnnnnnnnnnnnnnnnnnnnnnnnnnnnnnnnnnnnnnnnnnnnnnnnnnnnnnnnnnnnnnnnnnnnnnnnnnnnnnnnnnnnnnnnnnnnnnnnnnnnnnnnnnnnnnnnnnnnnnnnnnnnnnnnnnnnnnnnnnnnnnnnnnnnnnnnnnnnnnnnnnnnnnnnnnnnnnnnnnnnnnnnnnnnnnnnnnnnnnnnnnnnnnnnnnnnnnnnnnnnnnnnnnnnnnnnnnnnnnnnnnnnnnnnnnnnnnnnnnnnnnnnnnnnnnnnnnnnnnnnnnnnnnnnnnnnnnnnnnnnnnnnnnnnnnnnnnnnnnnnnnnnnnnnnnnnnnnnnnnnnnnnnnnnnnnnnnnnnnnnnnnnnnnnnnnnnnnnnnnnnnnnnnnnnnnnnnnnnnnnnnnnnnnnnnnnnnnnnnnnnnnnnnnnnnnnnnnnnnnnnnnnnnnnnnnnnnnnnnnnnnnnnnnnnnnnnnnnnnnnnnnnnnnnnnnnnnnnnnnnnnnnnnnnnnnnnnnnnnnnnnnnnnnnnnnnnnnnnnnnnnnnnnnnnnnnnnnnnnnnnnnnnnnnnnnnnnnnnnnnnnnnnnnnnnnnnnnnnnnnnnnnnnnnnnnnnnnnnnnnnnnnnnnnnnnnnnnnnnnnnnnnnnnnnnnnnnnnnnnnnnnnnnnnnnnnnnnnnnnnnnnnnnnnnnnnnnnnnnnnnnnnnnnnnnnnnnnnnnnnnnnnnnnnnnnnnnnnnnnnnnnnnnnnnnnnnnnnnnnnnnnnnnnnnnnnnnnnnnnnnnnnnnnnnnnnnnnnnnnnnnnnnnnnnnnnnnnnnnnnnnnnnnnnnnnnnnnnnnnnnnnnnnnnnnnnnnnnnnnnnnnnnnnnnnnnnnnnnnnnnnnnnnnnnnnnnnnnnnnnnnnnnnnnnnnnnnnnnnnnnnnnnnnnnnnnnnnnnnnnnnnnnnnnnnnnnnnnnnnnnnnnnnnnnnnnnnnnnnnnnnnnnnnnnnnnnnnnnnnnnnnnnnnnnnnnnnnnnnnnnnnnnnnnnnnnnnnnnnnnnnnnnnnnnnnnnnnnnnnnnnnnnnnnnnnnnnnnnnnnnnnnnnnnnnnnnnnnnnnnnnnnnnnnnnnnnnnnnnnnnnnnnnnnnnnnnnnnnnnnnnnnnnnnnnnnnnnnnnnnnnnnnnnnnnnnnnnnnnnnnnnnnnnnnnnnnnnnnnnnnnnnnnnnnnnnnnnnnnnnnnnnnnnnnnnnnnnnnnnnnnnnnnnnnnnnnnnnnnnnnnnnnnnnnnnnnnnnnnnnnnnnnnnnnnnnnnnnnnnnnnnnnnnnnnnnnnnnnnnnnnnnnnnnnnnnnnnnnnnnnnnnnnnnnnnnnnnnnnnnnnnnnnnnnnnnnnnnnnnnnnnnnnnnnnnnnnnnnnnnnnnnnnnnnnnnnnnnnnnnnnnnnnnnnnnnnnnnnnnnnnnnnnnnnnnnnnnnnnnnnnnnnnnnnnnnnnnnnnnnnnnnnnnnnnnnnnnnnnnnnnnnnnnnnnnnnnnnnnnnnnnnnnnnnnnnnnnnnnnnnnnnnnnnnnnnnnnnnnnnnnnnnnnnnnnnnnnnnnnnnnnnnnnnnnnnnnnnnnnnnnnnnnnnnnnnnnnnnnnnnnnnnnnnnnnnnnnnnnnnnnnnnnnnnnnnnnnnnnnnnnnnnnnnnnnnnnnnnnnnnnnnnnnnnnnnnnnnnnnnnnnnnnnnnnnnnnnnnnnnnnnnnnnnnnnnnnnnnnnnnnnnnnnnnnnnnnnnnnnnnnnnnnnnnnnnnnnnnnnnnnnnnnnnnnnnnnnnnnnnnnnnnnnnnnnnnnnnnnnnnnnnnnnnnnnnnnnnnnnnnnnnnnnnnnnnnnnnnnnnnnnnnnnnnnnnnnnnnnnnnnnnnnnnnnnnnnnnnnnnnnnnnnnnnnnnnnnnnnnnnnnnnnnnnnnnnnnnnnnnnnnnnnnnnnnnnnnnnnnnnnnnnnnnnnnnnnnnnnnnnnnnnnnnnnnnnnnnnnnnnnnnnnnnnnnnnnnnnnnnnnnnnnnnnnnnnnnnnnnnnnnnnnnnnnnnnnnnnnnnnnnnnnnnnnnnnnnnnnnnnnnnnnnnnnnnnnnnnnnnnnnnnnnnnnnnnnnnnnnnnnnnnnnnnnnnnnnnnnnnnnnnnnnnnnnnnnnnnnnnnnnnnnnnnnnnnnnnnnnnnnnnnnnnnnnnnnnnnnnnnnnnnnnnnnnnnnnnnnnnnnnnnnnnnnnnnnnnnnnnnnnnnnnnnnnnnnnnnnnnnnnnnnnnnnnnnnnnnnnnnnnnnnnnnnnnnnnnnnnnnnnnnnnnnnnnnnnnnnnnnnnnnnnnnnnnnnnnnnnnnnnnnnnnnnnnnnnnnnnnnnnnnnnnnnnnnnnnnnnnnnnnnnnnnnnnnnnnnnnnnnnnnnnnnnnnnnnnnnnnnnnnnnnnnnnnnnnnnnnnnnnnnnnnnnnnnnnnnnnnnnnnnnnnnnnnnnnnnnnnnnnnnnnnnnnnnnnnnnnnnnnnnnnnnnnnnnnnnnnnnnnnnnnnnnnnnnnnnnnnnnnnnnnnnnnnnnnnnnnnnnnnnnnnnnnnnnnnnnnnnnnnnnnnnnnnnnnnnnnnnnnnnnnnnnnnnnnnnnnnnnnnnnnnnnnnnnnnnnnnnnnnnnnnnnnnnnnnnnnnnnnnnnnnnnnnnnnnnnnnnnnnnnnnnnnnnnnnnnnnnnnnnnnnnnnnnnnnnnnnnnnnnnnnnnnnnnnnnnnnnnnnnnnnnnnnnnnnnnnnnnnnnnnnnnnnnnnnnnnnnnnnnnnnnnnnnnnnnnnnnnnnnnnnnnnnnnnnnnnnnnnnnnnnnnnnnnnnnnnnnnnnnnnnnnnnnnnnnnnnnnnnnnnnnnnnnnnnnnnnnnnnnnnnnnnnnnnnnnnnnnnnnnnnnnnnnnnnnnnnnnnnnnnnnnnnnnnnnnnnnnnnnnnnnnnnnnnnnnnnnnnnnnnnnnnnnnnnnnnnnnnnnnnnnnnnnnnnnnnnnnnnnnnnnnnnnnnnnnnnnnnnnnnnnnnnnnnnnnnnnnnnnnnnnnnnnnnnnnnnnnnnnnnnnnnnnnnnnnnnnnnnnnnnnnnnnnnnnnnnnnnnnnnnnnnnnnnnnnnnnnnnnnnnnnnnnnnnnnnnnnnnnnnnnnnnnnnnnnnnnnnnnnnnnnnnnnnnnnnnnnnnnnnnnnnnnnnnnnnnnnnnnnnnnnnnnnnnnnnnnnnnnnnnnnnnnnnnnnnnnnnnnnnnnnnnnnnnnnnnnnnnnnnnnnnnnnnnnnnnnnnnnnnnnnnnnnnnnnnnnnnnnnnnnnnnnnnnnnnnnnnnnnnnnnnnnnnnnnnnnnnnnnnnnnnnnnnnnnnnnnnnnnnnnnnnnnnnnnnnnnnnnnnnnnnnnnnnnnnnnnnnnnnnnnnnnnnnnnnnnnnnnnnnnnnnnnnnnnnnnnnnnnnnnnnnnnnnnnnnnnnnnnnnnnnnnnnnnnnnnnnnnnnnnnnnnnnnnnnnnnnnnnnnnnnnnnnnnnnnnnnnnnnnnnnnnnnnnnnnnnnnnnnnnnnnnnnnnnnnnnnnnnnnnnnnnnnnnnnnnnnnnnnnnnnnnnnnnnnnnnnnnnnnnnnnnnnnnnnnnnnnnnnnnnnnnnnnnnnnnnnnnnnnnnnnnnnnnnnnnnnnnnnnnnnnnnnnnnnnnnnnnnnnnnnnnnnnnnnnnnnnnnnnnnnnnnnnnnnnnnnnnnnnnnnnnnnnnnnnnnnnnnnnnnnnnnnnnnnnnnnnnnnnnnnnnnnnnnnnnnnnnnnnnnnnnnnnnnnnnnnnnnnnnnnnnnnnnnnnnnnnnnnnnnnnnnnnnnnnnnnnnnnnnnnnnnnnnnnnnnnnnnnnnnnnnnnnnnnnnnnnnnnnnnnnnnnnnnnnnnnnnnnnnnnnnnnnnnnnnnnnnnnnnnnnnnnnnnnnnnnnnnnnnnnnnnnnnnnnnnnnnnnnnnnnnnnnnnnnnnnnnnnnnnnnnnnnnnnnnnnnnnnnnnnnnnnnnnnnnnnnnnnnnnnnnnnnnnnnnnnnnnnnnnnnnnnnnnnnnnnnnnnnnnnnnnnnnnnnnnnnnnnnnnnnnnnnnnnnnnnnnnnnnnnnnnnnnnnnnnnnnnnnnnnnnnnnnnnnnnnnnnnnnnnnnnnnnnnnnnnnnnnnnnnnnnnnnnnnnnnnnnnnnnnnnnnnnnnnnnnnnnnnnnnnnnnnnnnnnnnnnnnnnnnnnnnnnnnnnnnnnnnnnnnnnnnnnnnnnnnnnnnnnnnnnnnnnnnnnnnnnnnnnnnnnnnnnnnnnnnnnnnnnnnnnnnnnnnnnnnnnnnnnnnnnnnnnnnnnnnnnnnnnnnnnnnnnnnnnnnnnnnnnnnnnnnnnnnnnnnnnnnnnnnnnnnnnnnnnnnnnnnnnnnnnnnnnnnnnnnnnnnnnnnnnnnnnnnnnnnnnnnnnnnnnnnnnnnnnnnnnnnnnnnnnnnnnnnnnnnnnnnnnnnnnnnnnnnnnnnnnnnnnnnnnnnnnnnnnnnnnnnnnnnnnnnnnnnnnnnnnnnnnnnnnnnnnnnnnnnnnnnnnnnnnnnnnnnnnnnnnnnnnnnnnnnnnnnnnnnnnnnnnnnnnnnnnnnnnnnnnnnnnnnnnnnnnnnnnnnnnnnnnnnnnnnnnnnnnnnnnnnnnnnnnnnnnnnnnnnnnnnnnnnnnnnnnnnnnnnnnnnnnnnnnnnnnnnnnnnnnnnnnnnnnnnnnnnnnnnnnnnnnnnnnnnnnnnnnnnnnnnnnnnnnnnnnnnnnnnnnnnnnnnnnnnnnnnnnnnnnnnnnnnnnnnnnnnnnnnnnnnnnnnnnnnnnnnnnnnnnnnnnnnnnnnnnnnnnnnnnnnnnnnnnnnnnnnnnnnnnnnnnnnnnnnnnnnnnnnnnnnnnnnnnnnnnnnnnnnnnnnnnnnnnnnnnnnnnnnnnnnnnnnnnnnnnnnnnnnnnnnnnnnnnnnnnnnnnnnnnnnnnnnnnnnnnnnnnnnnnnnnnnnnnnnnnnnnnnnnnnnnnnnnnnnnnnnnnnnnnnnnnnnnnnnnnnnnnnnnnnnnnnnnnnnnnnnnnnnnnnnnnnnnnnnnnnnnnnnnnnnnnnnnnnnnnnnnnnnnnnnnnnnnnnnnnnnnnnnnnnnnnnnnnnnnnnnnnnnnnnnnnnnnnnnnnnnnnnnnnnnnnnnnnnnnnnnnnnnnnnnnnnnnnnnnnnnnnnnnnnnnnnnnnnnnnnnnnnnnnnnnnnnnnnnnnnnnnnnnnnnnnnnnnnnnnnnnnnnnnnnnnnnnnnnnnnnnnnnnnnnnnnnnnnnnnnnnnnnnnnnnnnnnnnnnnnnnnnnnnnnnnnnnnnnnnnnnnnnnnnnnnnnnnnnnnnnnnnnnnnnnnnnnnnnnnnnnnnnnnnnnnnnnnnnnnnnnnnnnnnnnnnnnnnnnnnnnnnnnnnnnnnnnnnnnnnnnnnnnnnnnnnnnnnnnnnnnnnnnnnnnnnnnnnnnnnnnnnnnnnnnnnnnnnnnnnnnnnnnnnnnnnnnnnnnnnnnnnnnnnnnnnnnnnnnnnnnnnnnnnnnnnnnnnnnnnnnnnnnnnnnnnnnnnnnnnnnnnnnnnnnnnnnnnnnnnnnnnnnnnnnnnnnnnnnnnnnnnnnnnnnnnnnnnnnnnnnnnnnnnnnnnnnnnnnnnnnnnnnnnnnnnnnnnnnnnnnnnnnnnnnnnnnnnnnnnnnnnnnnnnnnnnnnnnnnnnnnnnnnnnnnnnnnnnnnnnnnnnnnnnnnnnnnnnnnnnnnnnnnnnnnnnnnnnnnnnnnnnnnnnnnnnnnnnnnnnnnnnnnnnnnnnnnnnnnnnnnnnnnnnnnnnnnnnnnnnnnnnnnnnnnnnnnnnnnnnnnnnnnnnnnnnnnnnnnnnnnnnnnnnnnnnnnnnnnnnnnnnnnnnnnnnnnnnnnnnnnnnnnnnnnnnnnnnnnnnnnnnnnnnnnnnnnnnnnnnnnnnnnnnnnnnnnnnnnnnnnnnnnnnnnnnnnnnnnnnnnnnnnnnnnnnnnnnnnnnnnnnnnnnnnnnnnnnnnnnnnnnnnnnnnnnnnnnnnnnnnnnnnnnnnnnnnnnnnnnnnnnnnnnnnnnnnnnnnnnnnnnnnnnnnnnnnnnnnnnnnnnnnnnnnnnnnnnnnnnnnnnnnnnnnnnnnnnnnnnnnnnnnnnnnnnnnnnnnnnnnnnnnnnnnnnnnnnnnnnnnnnnnnnnnnnnnnnnnnnnnnnnnnnnnnnnnnnnnnnnnnnnnnnnnnnnnnnnnnnnnnnnnnnnnnnnnnnnnnnnnnnnnnnnnnnnnnnnnnnnnnnnnnnnnnnnnnnnnnnnnnnnnnnnnnnnnnnnnnnnnnnnnnnnnnnnnnnnnnnnnnnnnnnnnnnnnnnnnnnnnnnnnnnnnnnnnnnnnnnnnnnnnnnnnnnnnnnnnnnnnnnnnnnnnnnnnnnnnnnnnnnnnnnnnnnnnnnnnnnnnnnnnnnnnnnnnnnnnnnnnnnnnnnnnnnnnnnnnnnnnnnnnnnnnnnnnnnnnnnnnnnnnnnnnnnnnnnnnnnnnnnnnnnnnnnnnnnnnnnnnnnnnnnnnnnnnnnnnnnnnnnnnnnnnnnnnnnnnnnnnnnnnnnnnnnnnnnnnnnnnnnnnnnnnnnnnnnnnnnnnnnnnnnnnnnnnnnnnnnnnnnnnnnnnnnnnnnnnnnnnnnnnnnnnnnnnnnnnnnnnnnnnnnnnnnnnnnnnnnnnnnnnnnnnnnnnnnnnnnnnnnnnnnnnnnnnnnnnnnnnnnnnnnnnnnnnnnnnnnnnnnnnnnnnnnnnnnnnnnnnnnnnnnnnnnnnnnnnnnnnnnnnnnnnnnnnnnnnnnnnnnnnnnnnnnnnnnnnnnnnnnnnnnnnnnnnnnnnnnnnnnnnnnnnnnnnnnnnnnnnnnnnnnnnnnnnnnnnnnnnnnnnnnnnnnnnnnnnnnnnnnnnnnnnnnnnnnnnnnnnnnnnnnnnnnnnnnnnnnnnnnnnnnnnnnnnnnnnnnnnnnnnnnnnnnnnnnnnnnnnnnnnnnnnnnnnnnnnnnnnnnnnnnnnnnnnnnnnnnnnnnnnnnnnnnnnnnnnnnnnnnnnnnnnnnnnnnnnnnnnnnnnnnnnnnnnnnnnnnnnnnnnnnnnnnnnnnnnnnnnnnnnnnnnnnnnnnnnnnnnnnnnnnnnnnnnnnnnnnnnnnnnnnnnnnnnnnnnnnnnnnnnnnnnnnnnnnnnnnnnnnnnnnnnnnnnnnnnnnnnnnnnnnnnnnnnnnnnnnnnnnnnnnnnnnnnnnnnnnnnnnnnnnnnnnnnnnnnnnnnnnnnnnnnnnnnnnnnnnnnnnnnnnnnnnnnnnnnnnnnnnnnnnnnnnnnnnnnnnnnnnnnnnnnnnnnnnnnnnnnnnnnnnnnnnnnnnnnnnnnnnnnnnnnnnnnnnnnnnnnnnnnnnnnnnnnnnnnnnnnnnnnnnnnnnnnnnnnnnnnnnnnnnnnnnnnnnnnnnnnnnnnnnnnnnnnnnnnnnnnnnnnnnnnnnnnnnnnnnnnnnnnnnnnnnnnnnnnnnnnnnnnnnnnnnnnnnnnnnnnnnnnnnnnnnnnnnnnnnnnnnnnnnnnnnnnnnnnnnnnnnnnnnnnnnnnnnnnnnnnnnnnnnnnnnnnnnnnnnnnnnnnnnnnnnnnnnnnnnnnnnnnnnnnnnnnnnnnnnnnnnnnnnnnnnnnnnnnnnnnnnnnnnnnnnnnnnnnnnnnnnnnnnnnnnnnnnnnnnnnnnnnnnnnnnnnnnnnnnnnnnnnnnnnnnnnnnnnnnnnnnnnnnnnnnnnnnnnnnnnnnnnnnnnnnnnnnnnnnnnnnnnnnnnnnnnnnnnnnnnnnnnnnnnnnnnnnnnnnnnnnnnnnnnnnnnnnnnnnnnnnnnnnnnnnnnnnnnnnnnnnnnnnnnnnnnnnnnnnnnnnnnnnnnnnnnnnnnnnnnnnnnnnnnnnnnnnnnnnnnnnnnnnnnnnnnnnnnnnnnnnnnnnnnnnnnnnnnnnnnnnnnnnnnnnnnnnnnnnnnnnnnnnnnnnnnnnnnnnnnnnnnnnnnnnnnnnnnnnnnnnnnnnnnnnnnnnnnnnnnnnnnnnnnnnnnnnnnnnnnnnnnnnnnnnnnnnnnnnnnnnnnnnnnnnnnnnnnnnnnnnnnnnnnnnnnnnnnnnnnnnnnnnnnnnnnnnnnnnnnnnnnnnnnnnnnnnnnnnnnnnnnnnnnnnnnnnnnnnnnnnnnnnnnnnnnnnnnnnnnnnnnnnnnnnnnnnnnnnnnnnnnnnnnnnnnnnnnnnnnnnnnnnnnnnnnnnnnnnnnnnnnnnnnnnnnnnnnnnnnnnnnnnnnnnnnnnnnnnnnnnnnnnnnnnnnnnnnnnnnnnnnnnnnnnnnnnnnnnnnnnnnnnnnnnnnnnnnnnnnnnnnnnnnnnnnnnnnnnnnnnnnnnnnnnnnnnnnnnnnnnnnnnnnnnnnnnnnnnnnnnnnnnnnnnnnnnnnnnnnnnnnnnnnnnnnnnnnnnnnnnnnnnnnnnnnnnnnnnnnnnnnnnnnnnnnnnnnnnnnnnnnnnnnnnnnnnnnnnnnnnnnnnnnnnnnnnnnnnnnnnnnnnnnnnnnnnnnnnnnnnnnnnnnnnnnnnnnnnnnnnnnnnnnnnnnnnnnnnnnnnnnnnnnnnnnnnnnnnnnnnnnnnnnnnnnnnnnnnnnnnnnnnnnnnnnnnnnnnnnnnnnnnnnnnnnnnnnnnnnnnnnnnnnnnnnnnnnnnnnnnnnnnnnnnnnnnnnnnnnnnnnnnnnnnnnnnnnnnnnnnnnnnnnnnnnnnnnnnnnnnnnnnnnnnnnnnnnnnnnnnnnnnnnnnnnnnnnnnnnnnnnnnnnnnnnnnnnnnnnnnnnnnnnnnnnnnnnnnnnnnnnnnnnnnnnnnnnnnnnnnnnnnnnnnnnnnnnnnnnnnnnnnnnnnnnnnnnnnnnnnnnnnnnnnnnnnnnnnnnnnnnnnnnnnnnnnnnnnnnnnnnnnnnnnnnnnnnnnnnnnnnnnnnnnnnnnnnnnnnnnnnnnnnnnnnnnnnnnnnnnnnnnnnnnnnnnnnnnnnnnnnnnnnnnnnnnnnnnnnnnnnnnnnnnnnnnnnnnnnnnnnnnnnnnnnnnnnnnnnnnnnnnnnnnnnnnnnnnnnnnnnnnnnnnnnnnnnnnnnnnnnnnnnnnnnnnnnnnnnnnnnnnnnnnnnnnnnnnnnnnnnnnnnnnnnnnnnnnnnnnnnnnnnnnnnnnnnnnnnnnnnnnnnnnnnnnnnnnnnnnnnnnnnnnnnnnnnnnnnnnnnnnnnnnnnnnnnnnnnnnnnnnnnnnnnnnnnnnnnnnnnnnnnnnnnnnnnnnnnnnnnnnnnnnnnnnnnnnnnnnnnnnnnnnnnnnnnnnnnnnnnnnnnnnnnnnnnnnnnnnnnnnnnnnnnnnnnnnnnnnnnnnnnnnnnnnnnnnnnnnnnnnnnnnnnnnnnnnnnnnnnnnnnnnnnnnnnnnnnnnnnnnnnnnnnnnnnnnnnnnnnnnnnnnnnnnnnnnnnnnnnnnnnnnnnnnnnnnnnnnnnnnnnnnnnnnnnnnnnnnnnnnnnnnnnnnnnnnnnnnnnnnnnnnnnnnnnnnnnnnnnnnnnnnnnnnnnnnnnnnnnnnnnnnnnnnnnnnnnnnnnnnnnnnnnnnnnnnnnnnnnnnnnnnnnnnnnnnnnnnnnnnnnnnnnnnnnnnnnnnnnnnnnnnnnnnnnnnnnnnnnnnnnnnnnnnnnnnnnnnnnnnnnnnnnnnnnnnnnnnnnnnnnnnnnnnnnnnnnnnnnnnnnnnnnnnnnnnnnnnnnnnnnnnnnnnnnnnnnnnnnnnnnnnnnnnnnnnnnnnnnnnnnnnnnnnnnnnnnnnnnnnnnnnnnnnnnnnnnnnnnnnnnnnnnnnnnnnnnnnnnnnnnnnnnnnnnnnnnnnnnnnnnnnnnnnnnnnnnnnnnnnnnnnnnnnnnnnnnnnnnnnnnnnnnnnnnnnnnnnnnnnnnnnnnnnnnnnnnnnnnnnnnnnnnnnnnnnnnnnnnnnnnnnnnnnnnnnnnnnnnnnnnnnnnnnnnnnnnnnnnnnnnnnnnnnnnnnnnnnnnnnnnnnnnnnnnnnnnnnnnnnnnnnnnnnnnnnnnnnnnnnnnnnnnnnnnnnnnnnnnnnnnnnnnnnnnnnnnnnnnnnnnnnnnnnnnnnnnnnnnnnnnnnnnnnnnnnnnnnnnnnnnnnnnnnnnnnnnnnnnnnnnnnnnnnnnnnnnnnnnnnnnnnnnnnnnnnnnnnnnnnnnnnnnnnnnnnnnnnnnnnnnnnnnnnnnnnnnnnnnnnnnnnnnnnnnnnnnnnnnnnnnnnnnnnnnnnnnnnnnnnnnnnnnnnnnnnnnnnnnnnnnnnnnnnnnnnnnnnnnnnnnnnnnnnnnnnnnnnnnnnnnnnnnnnnnnnnnnnnnnnnnnnnnnnnnnnnnnnnnnnnnnnnnnnnnnnnnnnnnnnnnnnnnnnnnnnnnnnnnnnnnnnnnnnnnnnnnnnnnnnnnnnnnnnnnnnnnnnnnnnnnnnnnnnnnnnnnnnnnnnnnnnnnnnnnnnnnnnnnnnnnnnnnnnnnnnnnnnnnnnnnnnnnnnnnnnnnnnnnnnnnnnnnnnnnnnnnnnnnnnnnnnnnnnnnnnnnnnnnnnnnnnnnnnnnnnnnnnnnnnnnnnnnnnnnnnnnnnnnnnnnnnnnnnnnnnnnnnnnnnnnnnnnnnnnnnnnnnnnnnnnnnnnnnnnnnnnnnnnnnnnnnnnnnnnnnnnnnnnnnnnnnnnnnnnnnnnnnnnnnnnnnnnnnnnnnnnnnnnnnnnnnnnnnnnnnnnnnnnnnnnnnnnnnnnnnnnnnnnnnnnnnnnnnnnnnnnnnnnnnnnnnnnnnnnnnnnnnnnnnnnnnnnnnnnnnnnnnnnnnnnnnnnnnnnnnnnnnnnnnnnnnnnnnnnnnnnnnnnnnnnnnnnnnnnnnnnnnnnnnnnnnnnnnnnnnnnnnnnnnnnnnnnnnnnnnnnnnnnnnnnnnnnnnnnnnnnnnnnnnnnnnnnnnnnnnnnnnnnnnnnnnnnnnnnnnnnnnnnnnnnnnnnnnnnnnnnnnnnnnnnnnnnnnnnnnnnnnnnnnnnnnnnnnnnnnnnnnnnnnnnnnnnnnnnnnnnnnnnnnnnnnnnnnnnnnnnnnnnnnnnnnnnnnnnnnnnnnnnnnnnnnnnnnnnnnnnnnnnnnnnnnnnnnnnnnnnnnnnnnnnnnnnnnnnnnnnnnnnnnnnnnnnnnnnnnnnnnnnnnnnnnnnnnnnnnnnnnnnnnnnnnnnnnnnnnnnnnnnnnnnnnnnnnnnnnnnnnnnnnnnnnnnnnnnnnnnnnnnnnnnnnnnnnnnnnnnnnnnnnnnnnnnnnnnnnnnnnnnnnnnnnnnnnnnnnnnnnnnnnnnnnnnnnnnnnnnnnnnnnnnnnnnnnnnnnnnnnnnnnnnnnnnnnnnnnnnnnnnnnnnnnnnnnnnnnnnnnnnnnnnnnnnnnnnnnnnnnnnnnnnnnnnnnnnnnnnnnnnnnnnnnnnnnnnnnnnnnnnnnnnnnnnnnnnnnnnnnnnnnnnnnnnnnnnnnnnnnnnnnnnnnnnnnnnnnnnnnnnnnnnnnnnnnnnnnnnnnnnnnnnnnnnnnnnnnnnnnnnnnnnnnnnnnnnnnnnnnnnnnnnnnnnnnnnnnnnnnnnnnnnnnnnnnnnnnnnnnnnnnnnnnnnnnnnnnnnnnnnnnnnnnnnnnnnnnnnnnnnnnnnnnnnnnnnnnnnnnnnnnnnnnnnnnnnnnnnnnnnnnnnnnnnnnnnnnnnnnnnnnnnnnnnnnnnnnnnnnnnnnnnnnnnnnnnnnnnnnnnnnnnnnnnnnnnnnnnnnnnnnnnnnnnnnnnnnnnnnnnnnnnnnnnnnnnnnnnnnnnnnnnnnnnnnnnnnnnnnnnnnnnnnnnnnnnnnnnnnnnnnnnnnnnnnnnnnnnnnnnnnnnnnnnnnnnnnnnnnnnnnnnnnnnnnnnnnnnnnnnnnnnnnnnnnnnnnnnnnnnnnnnnnnnnnnnnnnnnnnnnnnnnnnnnnnnnnnnnnnnnnnnnnnnnnnnnnnnnnnnnnnnnnnnnnnnnnnnnnnnnnnnnnnnnnnnnnnnnnnnnnnnnnnnnnnnnnnnnnnnnnnnnnnnnnnnnnnnnnnnnnnnnnnnnnnnnnnnnnnnnnnnnnnnnnnnnnnnnnnnnnnnnnnnnnnnnnnnnnnnnnnnnnnnnnnnnnnnnnnnnnnnnnnnnnnnnnnnnnnnnnnnnnnnnnnnnnnnnnnnnnnnnnnnnnnnnnnnnnnnnnnnnnnnnnnnnnnnnnnnnnnnnnnnnnnnnnnnnnnnnnnnnnnnnnnnnnnnnnnnnnnnnnnnnnnnnnnnnnnnnnnnnnnnnnnnnnnnnnnnnnnnnnnnnnnnnnnnnnnnnnnnnnnnnnnnnnnnnnnnnnnnnnnnnnnnnnnnnnnnnnnnnnnnnnnnnnnnnnnnnnnnnnnnnnnnnnnnnnnnnnnnnnnnnnnnnnnnnnnnnnnnnnnnnnnnnnnnnnnnnnnnnnnnnnnnnnnnnnnnnnnnnnnnnnnnnnnnnnnnnnnnnnnnnnnnnnnnnnnnnnnnnnnnnnnnnnnnnnnnnnnnnnnnnnnnnnnnnnnnnnnnnnnnnnnnnnnnnnnnnnnnnnnnnnnnnnnnnnnnnnnnnnnnnnnnnnnnnnnnnnnnnnnnnnnnnnnnnnnnnnnnnnnnnnnnnnnnnnnnnnnnnnnnnnnnnnnnnnnnnnnnnnnnnnnnnnnnnnnnnnnnnnnnnnnnnnnnnnnnnnnnnnnnnnnnnnnnnnnnnnnnnnnnnnnnnnnnnnnnnnnnnnnnnnnnnnnnnnnnnnnnnnnnnnnnnnnnnnnnnnnnnnnnnnnnnnnnnnnnnnnnnnnnnnnnnnnnnnnnnnnnnnnnnnnnnnnnnnnnnnnnnnnnnnnnnnnnnnnnnnnnnnnnnnnnnnnnnnnnnnnnnnnnnnnnnnnnnnnnnnnnnnnnnnnnnnnnnnnnnnnnnnnnnnnnnnnnnnnnnnnnnnnnnnnnnnnnnnnnnnnnnnnnnnnnnnnnnnnnnnnnnnnnnnnnnnnnnnnnnnnnnnnnnnnnnnnnnnnnnnnnnnnnnnnnnnnnnnnnnnnnnnnnnnnnnnnnnnnnnnnnnnnnnnnnnnnnnnnnnnnnnnnnnnnnnnnnnnnnnnnnnnnnnnnnnnnnnnnnnnnnnnnnnnnnnnnnnnnnnnnnnnnnnnnnnnnnnnnnnnnnnnnnnnnnnnnnnnnnnnnnnnnnnnnnnnnnnnnnnnnnnnnnnnnnnnnnnnnnnnnnnnnnnnnnnnnnnnnnnnnnnnnnnnnnnnnnnnnnnnnnnnnnnnnnnnnnnnnnnnnnnnnnnnnnnnnnnnnnnnnnnnnnnnnnnnnnnnnnnnnnnnnnnnnnnnnnnnnnnnnnnnnnnnnnnnnnnnnnnnnnnnnnnnnnnnnnnnnnnnnnnnnnnnnnnnnnnnnnnnnnnnnnnnnnnnnnnnnnnnnnnnnnnnnnnnnnnnnnnnnnnnnnnnnnnnnnnnnnnnnnnnnnnnnnnnnnnnnnnnnnnnnnnnnnnnnnnnnnnnnnnnnnnnnnnnnnnnnnnnnnnnnnnnnnnnnnnnnnnnnnnnnnnnnnnnnnnnnnnnnnnnnnnnnnnnnnnnnnnnnnnnnnnnnnnnnnnnnnnnnnnnnnnnnnnnnnnnnnnnnnnnnnnnnnnnnnnnnnnnnnnnnnnnnnnnnnnnnnnnnnnnnnnnnnnnnnnnnnnnnnnnnnnnnnnnnnnnnnnnnnnnnnnnnnnnnnnnnnnnnnnnnnnnnnnnnnnnnnnnnnnnnnnnnnnnnnnnnnnnnnnnnnnnnnnnnnnnnnnnnnnnnnnnnnnnnnnnnnnnnnnnnnnnnnnnnnnnnnnnnnnnnnnnnnnnnnnnnnnnnnnnnnnnnnnnnnnnnnnnnnnnnnnnnnnnnnnnnnnnnnnnnnnnnnnnnnnnnnnnnnnnnnnnnnnnnnnnnnnnnnnnnnnnnnnnnnnnnnnnnnnnnnnnnnnnnnnnnnnnnnnnnnnnnnnnnnnnnnnnnnnnnnnnnnnnnnnnnnnnnnnnnnnnnnnnnnnnnnnnnnnnnnnnnnnnnnnnnnnnnnnnnnnnnnnnnnnnnnnnnnnnnnnnnnnnnnnnnnnnnnnnnnnnnnnnnnnnnnnnnnnnnnnnnnnnnnnnnnnnnnnnnnnnnnnnnnnnnnnnnnnnnnnnnnnnnnnnnnnnnnnnnnnnnnnnnnnnnnnnnnnnnnnnnnnnnnnnnnnnnnnnnnnnnnnnnnnnnnnnnnnnnnnnnnnnnnnnnnnnnnnnnnnnnnnnnnnnnnnnnnnnnnnnnnnnnnnnnnnnnnnnnnnnnnnnnnnnnnnnnnnnnnnnnnnnnnnnnnnnnnnnnnnnnnnnnnnnnnnnnnnnnnnnnnnnnnnnnnnnnnnnnnnnnnnnnnnnnnnnnnnnnnnnnnnnnnnnnnnnnnnnnnnnnnnnnnnnnnnnnnnnnnnnnnnnnnnnnnnnnnnnnnnnnnnnnnnnnnnnnnnnnnnnnnnnnnnnnnnnnnnnnnnnnnnnnnnnnnnnnnnnnnnnnnnnnnnnnnnnnnnnnnnnnnnnnnnnnnnnnnnnnnnnnnnnnnnnnnnnnnnnnnnnnnnnnnnnnnnnnnnnnnnnnnnnnnnnnnnnnnnnnnnnnnnnnnnnnnnnnnnnnnnnnnnnnnnnnnnnnnnnnnnnnnnnnnnnnnnnnnnnnnnnnnnnnnnnnnnnnnnnnnnnnnnnnnnnnnnnnnnnnnnnnnnnnnnnnnnnnnnnnnnnnnnnnnnnnnnnnnnnnnnnnnnnnnnnnnnnnnnnnnnnnnnnnnnnnnnnnnnnnnnnnnnnnnnnnnnnnnnnnnnnnnnnnnnnnnnnnnnnnnnnnnnnnnnnnnnnnnnnnnnnnnnnnnnnnnnnnnnnnnnnnnnnnnnnnnnnnnnnnnnnnnnnnnnnnnnnnnnnnnnnnnnnnnnnnnnnnnnnnnnnnnnnnnnnnnnnnnnnnnnnnnnnnnnnnnnnnnnnnnnnnnnnnnnnnnnnnnnnnnnnnnnnnnnnnnnnnnnnnnnnnnnnnnnnnnnnnnnnnnnnnnnnnnnnnnnnnnnnnnnnnnnnnnnnnnnnnnnnnnnnnnnnnnnnnnnnnnnnnnnnnnnnnnnnnnnnnnnnnnnnnnnnnnnnnnnnnnnnnnnnnnnnnnnnnnnnnnnnnnnnnnnnnnnnnnnnnnnnnnnnnnnnnnnnnnnnnnnnnnnnnnnnnnnnnnnnnnnnnnnnnnnnnnnnnnnnnnnnnnnnnnnnnnnnnnnnnnnnnnnnnnnnnnnnnnnnnnnnnnnnnnnnnnnnnnnnnnnnnnnnnnnnnnnnnnnnnnnnnnnnnnnnnnnnnnnnnnnnnnnnnnnnnnnnnnnnnnnnnnnnnnnnnnnnnnnnnnnnnnnnnnnnnnnnnnnnnnnnnnnnnnnnnnnnnnnnnnnnnnnnnnnnnnnnnnnnnnnnnnnnnnnnnnnnnnnnnnnnnnnnnnnnnnnnnnnnnnnnnnnnnnnnnnnnnnnnnnnnnnnnnnnnnnnnnnnnnnnnnnnnnnnnnnnnnnnnnnnnnnnnnnnnnnnnnnnnnnnnnnnnnnnnnnnnnnnnnnnnnnnnnnnnnnnnnnnnnnnnnnnnnnnnnnnnnnnnnnnnnnnnnnnnnnnnnnnnnnnnnnnnnnnnnnnnnnnnnnnnnnnnnnnnnnnnnnnnnnnnnnnnnnnnnnnnnnnnnnnnnnnnnnnnnnnnnnnnnnnnnnnnnnnnnnnnnnnnnnnnnnnnnnnnnnnnnnnnnnnnnnnnnnnnnnnnnnnnnnnnnnnnnnnnnnnnnnnnnnnnnnnnnnnnnnnnnnnnnnnnnnnnnnnnnnnnnnnnnnnnnnnnnnnnnnnnnnnnnnnnnnnnnnnnnnnnnnnnnnnnnnnnnnnnnnnnnnnnnnnnnnnnnnnnnnnnnnnnnnnnnnnnnnnnnnnnnnnnnnnnnnnnnnnnnnnnnnnnnnnnnnnnnnnnnnnnnnnnnnnnnnnnnnnnnnnnnnnnnnnnnnnnnnnnnnnnnnnnnnnnnnnnnnnnnnnnnnnnnnnnnnnnnnnnnnnnnnnnnnnnnnnnnnnnnnnnnnnnnnnnnnnnnnnnnnnnnnnnnnnnnnnnnnnnnnnnnnnnnnnnnnnnnnnnnnnnnnnnnnnnnnnnnnnnnnnnnnnnnnnnnnnnnnnnnnnnnnnnnnnnnnnnnnnnnnnnnnnnnnnnnnnnnnnnnnnnnnnnnnnnnnnnnnnnnnnnnnnnnnnnnnnnnnnnnnnnnnnnnnnnnnnnnnnnnnnnnnnnnnnnnnnnnnnnnnnnnnnnnnnnnnnnnnnnnnnnnnnnnnnnnnnnnnnnnnnnnnnnnnnnnnnnnnnnnnnnnnnnnnnnnnnnnnnnnnnnnnnnnnnnnnnnnnnnnnnnnnnnnnnnnnnnnnnnnnnnnnnnnnnnnnnnnnnnnnnnnnnnnnnnnnnnnnnnnnnnnnnnnnnnnnnnnnnnnnnnnnnnnnnnnnnnnnnnnnnnnnnnnnnnnnnnnnnnnnnnnnnnnnnnnnnnnnnnnnnnnnnnnnnnnnnnnnnnnnnnnnnnnnnnnnnnnnnnnnnnnnnnnnnnnnnnnnnnnnnnnnnnnnnnnnnnnnnnnnnnnnnnnnnnnnnnnnnnnnnnnnnnnnnnnnnnnnnnnnnnnnnnnnnnnnnnnnnnnnnnnnnnnnnnnnnnnnnnnnnnnnnnnnnnnnnnnnnnnnnnnnnnnnnnnnnnnnnnnnnnnnnnnnnnnnnnnnnnnnnnnnnnnnnnnnnnnnnnnnnnnnnnnnnnnnnnnnnnnnnnnnnnnnnnnnnnnnnnnnnnnnnnnnnnnnnnnnnnnnnnnnnnnnnnnnnnnnnnnnnnnnnnnnnnnnnnnnnnnnnnnnnnnnnnnnnnnnnnnnnnnnnnnnnnnnnnnnnnnnnnnnnnnnnnnnnnnnnnnnnnnnnnnnnnnnnnnnnnnnnnnnnnnnnnnnnnnnnnnnnnnnnnnnnnnnnnnnnnnnnnnnnnnnnnnnnnnnnnnnnnnnnnnnnnnnnnnnnnnnnnnnnnnnnnnnnnnnnnnnnnnnnnnnnnnnnnnnnnnnnnnnnnnnnnnnnnnnnnnnnnnnnnnnnnnnnnnnnnnnnnnnnnnnnnnnnnnnnnnnnnnnnnnnnnnnnnnnnnnnnnnnnnnnnnnnnnnnnnnnnnnnnnnnnnnnnnnnnnnnnnnnnnnnnnnnnnnnnnnnnnnnnnnnnnnnnnnnnnnnnnnnnnnnnnnnnnnnnnnnnnnnnnnnnnnnnnnnnnnnnnnnnnnnnnnnnnnnnnnnnnnnnnnnnnnnnnnnnnnnnnnnnnnnnnnnnnnnnnnnnnnnnnnnnnnnnnnnnnnnnnnnnnnnnnnnnnnnnnnnnnnnnnnnnnnnnnnnnnnnnnnnnnnnnnnnnnnnnnnnnnnnnnnnnnnnnnnnnnnnnnnnnnnnnnnnnnnnnnnnnnnnnnnnnnnnnnnnnnnnnnnnnnnnnnnnnnnnnnnnnnnnnnnnnnnnnnnnnnnnnnnnnnnnnnnnnnnnnnnnnnnnnnnnnnnnnnnnnnnnnnnnnnnnnnnnnnnnnnnnnnnnnnnnnnnnnnnnnnnnnnnnnnnnnnnnnnnnnnnnnnnnnnnnnnnnnnnnnnnnnnnnnnnnnnnnnnnnnnnnnnnnnnnnnnnnnnnnnnnnnnnnnnnnnnnnnnnnnnnnnnnnnnnnnnnnnnnnnnnnnnnnnnnnnnnnnnnnnnnnnnnnnnnnnnnnnnnnnnnnnnnnnnnnnnnnnnnnnnnnnnnnnnnnnnnnnnnnnnnnnnnnnnnnnnnnnnnnnnnnnnnnnnnnnnnnnnnnnnnnnnnnnnnnnnnnnnnnnnnnnnnnnnnnnnnnnnnnnnnnnnnnnnnnnnnnnnnnnnnnnnnnnnnnnnnnnnnnnnnnnnnnnnnnnnnnnnnnnnnnnnnnnnnnnnnnnnnnnnnnnnnnnnnnnnnnnnnnnnnnnnnnnnnnnnnnnnnnnnnnnnnnnnnnnnnnnnnnnnnnnnnnnnnnnnnnnnnnnnnnnnnnnnnnnnnnnnnnnnnnnnnnnnnnnnnnnnnnnnnnnnnnnnnnnnnnnnnnnnnnnnnnnnnnnnnnnnnnnnnnnnnnnnnnnnnnnnnnnnnnnnnnnnnnnnnnnnnnnnnnnnnnnnnnnnnnnnnnnnnnnnnnnnnnnnnnnnnnnnnnnnnnnnnnnnnnnnnnnnnnnnnnnnnnnnnnnnnnnnnnnnnnnnnnnnnnnnnnnnnnnnnnnnnnnnnnnnnnnnnnnnnnnnnnnnnnnnnnnnnnnnnnnnnnnnnnnnnnnnnnnnnnnnnnnnnnnnnnnnnnnnnnnnnnnnnnnnnnnnnnnnnnnnnnnnnnnnnnnnnnnnnnnnnnnnnnnnnnnnnnnnnnnnnnnnnnnnnnnnnnnnnnnnnnnnnnnnnnnnnnnnnnnnnnnnnnnnnnnnnnnnnnnnnnnnnnnnnnnnnnnnnnnnnnnnnnnnnnnnnnnnnnnnnnnnnnnnnnnnnnnnnnnnnnnnnnnnnnnnnnnnnnnnnnnnnnnnnnnnnnnnnnnnnnnnnnnnnnnnnnnnnnnnnnnnnnnnnnnnnnnnnnnnnnnnnnnnnnnnnnnnnnnnnnnnnnnnnnnnnnnnnnnnnnnnnnnnnnnnnnnnnnnnnnnnnnnnnnnnnnnnnnnnnnnnnnnnnnnnnnnnnnnnnnnnnnnnnnnnnnnnnnnnnnnnnnnnnnnnnnnnnnnnnnnnnnnnnnnnnnnnnnnnnnnnnnnnnnnnnnnnnnnnnnnnnnnnnnnnnnnnnnnnnnnnnnnnnnnnnnnnnnnnnnnnnnnnnnnnnnnnnnnnnnnnnnnnnnnnnnnnnnnnnnnnnnnnnnnnnnnnnnnnnnnnnnnnnnnnnnnnnnnnnnnnnnnnnnnnnnnnnnnnnnnnnnnnnnnnnnnnnnnnnnnnnnnnnnnnnnnnnnnnnnnnnnnnnnnnnnnnnnnnnnnnnnnnnnnnnnnnnnnnnnnnnnnnnnnnnnnnnnnnnnnnnnnnnnnnnnnnnnnnnnnnnnnnnnnnnnnnnnnnnnnnnnnnnnnnnnnnnnnnnnnnnnnnnnnnnnnnnnnnnnnnnnnnnnnnnnnnnnnnnnnnnnnnnnnnnnnnnnnnnnnnnnnnnnnnnnnnnnnnnnnnnnnnnnnnnnnnnnnnnnnnnnnnnnnnnnnnnnnnnnnnnnnnnnnnnnnnnnnnnnnnnnnnnnnnnnnnnnnnnnnnnnnnnnnnnnnnnnnnnnnnnnnnnnnnnnnnnnnnnnnnnnnnnnnnnnnnnnnnnnnnnnnnnnnnnnnnnnnnnnnnnnnnnnnnnnnnnnnnnnnnnnnnnnnnnnnnnnnnnnnnnnnnnnnnnnnnnnnnnnnnnnnnnnnnnnnnnnnnnnnnnnnnnnnnnnnnnnnnnnnnnnnnnnnnnnnnnnnnnnnnnnnnnnnnnnnnnnnnnnnnnnnnnnnnnnnnnnnnnnnnnnnnnnnnnnnnnnnnnnnnnnnnnnnnnnnnnnnnnnnnnnnnnnnnnnnnnnnnnnnnnnnnnnnnnnnnnnnnnnnnnnnnnnnnnnnnnnnnnnnnnnnnnnnnnnnnnnnnnnnnnnnnnnnnnnnnnnnnnnnnnnnnnnnnnnnnnnnnnnnnnnnnnnnnnnnnnnnnnnnnnnnnnnnnnnnnnnnnnnnnnnnnnnnnnnnnnnnnnnnnnnnnnnnnnnnnnnnnnnnnnnnnnnnnnnnnnnnnnnnnnnnnnnnnnnnnnnnnnnnnnnnnnnnnnnnnnnnnnnnnnnnnnnnnnnnnnnnnnnnnnnnnnnnnnnnnnnnnnnnnnnnnnnnnnnnnnnnnnnnnnnnnnnnnnnnnnnnnnnnnnnnnnnnnnnnnnnnnnnnnnnnnnnnnnnnnnnnnnnnnnnnnnnnnnnnnnnnnnnnnnnnnnnnnnnnnnnnnnnnnnnnnnnnnnnnnnnnnnnnnnnnnnnnnnnnnnnnnnnnnnnnnnnnnnnnnnnnnnnnnnnnnnnnnnnnnnnnnnnnnnnnnnnnnnnnnnnnnnnnnnnnnnnnnnnnnnnnnnnnnnnnnnnnnnnnnnnnnnnnnnnnnnnnnnnnnnnnnnnnnnnnnnnnnnnnnnnnnnnnnnnnnnnnnnnnnnnnnnnnnnnnnnnnnnnnnnnnnnnnnnnnnnnnnnnnnnnnnnnnnnnnnnnnnnnnnnnnnnnnnnnnnnnnnnnnnnnnnnnnnnnnnnnnnnnnnnnnnnnnnnnnnnnnnnnnnnnnnnnnnnnnnnnnnnnnnnnnnnnnnnnnnnnnnnnnnnnnnnnnnnnnnnnnnnnnnnnnnnnnnnnnnnnnnnnnnnnnnnnnnnnnnnnnnnnnnnnnnnnnnnnnnnnnnnnnnnnnnnnnnnnnnnnnnnnnnnnnnnnnnnnnnnnnnnnnnnnnnnnnnnnnnnnnnnnnnnnnnnnnnnnnnnnnnnnnnnnnnnnnnnnnnnnnnnnnnnnnnnnnnnnnnnnnnnnnnnnnnnnnnnnnnnnnnnnnnnnnnnnnnnnnnnnnnnnnnnnnnnnnnnnnnnnnnnnnnnnnnnnnnnnnnnnnnnnnnnnnnnnnnnnnnnnnnnnnnnnnnnnnnnnnnnnnnnnnnnnnnnnnnnnnnnnnnnnnnnnnnnnnnnnnnnnnnnnnnnnnnnnnnnnnnnnnnnnnnnnnnnnnnnnnnnnnnnnnnnnnnnnnnnnnnnnnnnnnnnnnnnnnnnnnnnnnnnnnnnnnnnnnnnnnnnnnnnnnnnnnnnnnnnnnnnnnnnnnnnnnnnnnnnnnnnnnnnnnnnnnnnnnnnnnnnnnnnnnnnnnnnnnnnnnnnnnnnnnnnnnnnnnnnnnnnnnnnnnnnnnnnnnnnnnnnnnnnnnnnnnnnnnnnnnnnnnnnnnnnnnnnnnnnnnnnnnnnnnnnnnnnnnnnnnnnnnnnnnnnnnnnnnnnnnnnnnnnnnnnnnnnnnnnnnnnnnnnnnnnnnnnnnnnnnnnnnnnnnnnnnnnnnnnnnnnnnnnnnnnnnnnnnnnnnnnnnnnnnnnnnnnnnnnnnnnnnnnnnnnnnnnnnnnnnnnnnnnnnnnnnnnnnnnnnnnnnnnnnnnnnnnnnnnnnnnnnnnnnnnnnnnnnnnnnnnnnnnnnnnnnnnnnnnnnnnnnnnnnnnnnnnnnnnnnnnnnnnnnnnnnnnnnnnnnnnnnnnnnnnnnnnnnnnnnnnnnnnnnnnnnnnnnnnnnnnnnnnnnnnnnnnnnnnnnnnnnnnnnnnnnnnnnnnnnnnnnnnnnnnnnnnnnnnnnnnnnnnnnnnnnnnnnnnnnnnnnnnnnnnnnnnnnnnnnnnnnnnnnnnnnnnnnnnnnnnnnnnnnnnnnnnnnnnnnnnnnnnnnnnnnnnnnnnnnnnnnnnnnnnnnnnnnnnnnnnnnnnnnnnnnnnnnnnnnnnnnnnnnnnnnnnnnnnnnnnnnnnnnnnnnnnnnnnnnnnnnnnnnnnnnnnnnnnnnnnnnnnnnnnnnnnnnnnnnnnnnnnnnnnnnnnnnnnnnnnnnnnnnnnnnnnnnnnnnnnnnnnnnnnnnnnnnnnnnnnnnnnnnnnnnnnnnnnnnnnnnnnnnnnnnnnnnnnnnnnnnnnnnnnnnnnnnnnnnnnnnnnnnnnnnnnnnnnnnnnnnnnnnnnnnnnnnnnnnnnnnnnnnnnnnnnnnnnnnnnnnnnnnnnnnnnnnnnnnnnnnnnnnnnnnnnnnnnnnnnnnnnnnnnnnnnnnnnnnnnnnnnnnnnnnnnnnnnnnnnnnnnnnnnnnnnnnnnnnnnnnnnnnnnnnnnnnnnnnnnnnnnnnnnnnnnnnnnnnnnnnnnnnnnnnnnnnnnnnnnnnnnnnnnnnnnnnnnnnnnnnnnnnnnnnnnnnnnnnnnnnnnnnnnnnnnnnnnnnnnnnnnnnnnnnnnnnnnnnnnnnnnnnnnnnnnnnnnnnnnnnnnnnnnnnnnnnnnnnnnnnnnnnnnnnnnnnnnnnnnnnnnnnnnnnnnnnnnnnnnnnnnnnnnnnnnnnnnnnnnnnnnnnnnnnnnnnnnnnnnnnnnnnnnnnnnnnnnnnnnnnnnnnnnnnnnnnnnnnnnnnnnnnnnnnnnnnnnnnnnnnnnnnnnnnnnnnnnnnnnnnnnnnnnnnnnnnnnnnnnnnnnnnnnnnnnnnnnnnnnnnnnnnnnnnnnnnnnnnnnnnnnnnnnnnnnnnnnnnnnnnnnnnnnnnnnnnnnnnnnnnnnnnnnnnnnnnnnnnnnnnnnnnnnnnnnnnnnnnnnnnnnnnnnnnnnnnnnnnnnnnnnnnnnnnnnnnnnnnnnnnnnnnnnnnnnnnnnnnnnnnnnnnnnnnnnnnnnnnnnnnnnnnnnnnnnnnnnnnnnnnnnnnnnnnnnnnnnnnnnnnnnnnnnnnnnnnnnnnnnnnnnnnnnnnnnnnnnnnnnnnnnnnnnnnnnnnnnnnnnnnnnnnnnnnnnnnnnnnnnnnnnnnnnnnnnnnnnnnnnnnnnnnnnnnnnnnnnnnnnnnnnnnnnnnnnnnnnnnnnnnnnnnnnnnnnnnnnnnnnnnnnnnnnnnnnnnnnnnnnnnnnnnnnnnnnnnnnnnnnnnnnnnnnnnnnnnnnnnnnnnnnnnnnnnnnnnnnnnnnnnnnnnnnnnnnnnnnnnnnnnnnnnnnnnnnnnnnnnnnnnnnnnnnnnnnnnnnnnnnnnnnnnnnnnnnnnnnnnnnnnnnnnnnnnnnnnnnnnnnnnnnnnnnnnnnnnnnnnnnnnnnnnnnnnnnnnnnnnnnnnnnnnnnnnnnnnnnnnnnnnnnnnnnnnnnnnnnnnnnnnnnnnnnnnnnnnnnnnnnnnnnnnnnnnnnnnnnnnnnnnnnnnnnnnnnnnnnnnnnnnnnnnnnnnnnnnnnnnnnnnnnnnnnnnnnnnnnnnnnnnnnnnnnnnnnnnnnnnnnnnnnnnnnnnnnnnnnnnnnnnnnnnnnnnnnnnnnnnnnnnnnnnnnnnnnnnnnnnnnnnnnnnnnnnnnnnnnnnnnnnnnnnnnnnnnnnnnnnnnnnnnnnnnnnnnnnnnnnnnnnnnnnnnnnnnnnnnnnnnnnnnnnnnnnnnnnnnnnnnnnnnnnnnnnnnnnnnnnnnnnnnnnnnnnnnnnnnnnnnnnnnnnnnnnnnnnnnnnnnnnnnnnnnnnnnnnnnnnnnnnnnnnnnnnnnnnnnnnnnnnnnnnnnnnnnnnnnnnnnnnnnnnnnnnnnnnnnnnnnnnnnnnnnnnnnnnnnnnnnnnnnnnnnnnnnnnnnnnnnnnnnnnnnnnnnnnnnnnnnnnnnnnnnnnnnnnnnnnnnnnnnnnnnnnnnnnnnnnnnnnnnnnnnnnnnnnnnnnnnnnnnnnnnnnnnnnnnnnnnnnnnnnnnnnnnnnnnnnnnnnnnnnnnnnnnnnnnnnnnnnnnnnnnnnnnnnnnnnnnnnnnnnnnnnnnnnnnnnnnnnnnnnnnnnnnnnnnnnnnnnnnnnnnnnnnnnnnnnnnnnnnnnnnnnnnnnnnnnnnnnnnnnnnnnnnnnnnnnnnnnnnnnnnnnnnnnnnnnnnnnnnnnnnnnnnnnnnnnnnnnnnnnnnnnnnnnnnnnnnnnnnnnnnnnnnnnnnnnnnnnnnnnnnnnnnnnnnnnnnnnnnnnnnnnnnnnnnnnnnnnnnnnnnnnnnnnnnnnnnnnnnnnnnnnnnnnnnnnnnnnnnnnnnnnnnnnnnnnnnnnnnnnnnnnnnnnnnnnnnnnnnnnnnnnnnnnnnnnnnnnnnnnnnnnnnnnnnnnnnnnnnnnnnnnnnnnnnnnnnnnnnnnnnnnnnnnnnnnnnnnnnnnnnnnnnnnnnnnnnnnnnnnnnnnnnnnnnnnnnnnnnnnnnnnnnnnnnnnnnnnnnnnnnnnnnnnnnnnnnnnnnnnnnnnnnnnnnnnnnnnnnnnnnnnnnnnnnnnnnnnnnnnnnnnnnnnnnnnnnnnnnnnnnnnnnnnnnnnnnnnnnnnnnnnnnnnnnnnnnnnnnnnnnnnnnnnnnnnnnnnnnnnnnnnnnnnnnnnnnnnnnnnnnnnnnnnnnnnnnnnnnnnnnnnnnnnnnnnnnnnnnnnnnnnnnnnnnnnnnnnnnnnnnnnnnnnnnnnnnnnnnnnnnnnnnnnnnnnnnnnnnnnnnnnnnnnnnnnnnnnnnnnnnnnnnnnnnnnnnnnnnnnnnnnnnnnnnnnnnnnnnnnnnnnnnnnnnnnnnnnnnnnnnnnnnnnnnnnnnnnnnnnnnnnnnnnnnnnnnnnnnnnnnnnnnnnnnnnnnnnnnnnnnnnnnnnnnnnnnnnnnnnnnnnnnnnnnnnnnnnnnnnnnnnnnnnnnnnnnnnnnnnnnnnnnnnnnnnnnnnnnnnnnnnnnnnnnnnnnnnnnnnnnnnnnnnnnnnnnnnnnnnnnnnnnnnnnnnnnnnnnnnnnnnnnnnnnnnnnnnnnnnnnnnnnnnnnnnnnnnnnnnnnnnnnnnnnnnnnnnnnnnnnnnnnnnnnnnnnnnnnnnnnnnnnnnnnnnnnnnnnnnnnnnnnnnnnnnnnnnnnnnnnnnnnnnnnnnnnnnnnnnnnnnnnnnnnnnnnnnnnnnnnnnnnnnnnnnnnnnnnnnnnnnnnnnnnnnnnnnnnnnnnnnnnnnnnnnnnnnnnnnnnnnnnnnnnnnnnnnnnnnnnnnnnnnnnnnnnnnnnnnnnnnnnnnnnnnnnnnnnnnnnnnnnnnnnnnnnnnnnnnnnnnnnnnnnnnnnnnnnnnnnnnnnnnnnnnnnnnnnnnnnnnnnnnnnnnnnnnnnnnnnnnnnnnnnnnnnnnnnnnnnnnnnnnnnnnnnnnnnnnnnnnnnnnnnnnnnnnnnnnnnnnnnnnnnnnnnnnnnnnnnnnnnnnnnnnnnnnnnnnnnnnnnnnnnnnnnnnnnnnnnnnnnnnnnnnnnnnnnnnnnnnnnnnnnnnnnnnnnnnnnnnnnnnnnnnnnnnnnnnnnnnnnnnnnnnnnnnnnnnnnnnnnnnnnnnnnnnnnnnnnnnnnnnnnnnnnnnnnnnnnnnnnnnnnnnnnnnnnnnnnnnnnnnnnnnnnnnnnnnnnnnnnnnnnnnnnnnnnnnnnnnnnnnnnnnnnnnnnnnnnnnnnnnnnnnnnnnnnnnnnnnnnnnnnnnnnnnnnnnnnnnnnnnnnnnnnnnnnnnnnnnnnnnnnnnnnnnnnnnnnnnnnnnnnnnnnnnnnnnnnnnnnnnnnnnnnnnnnnnnnnnnnnnnnnnnnnnnnnnnnnnnnnnnnnnnnnnnnnnnnnnnnnnnnnnnnnnnnnnnnnnnnnnnnnnnnnnnnnnnnnnnnnnnnnnnnnnnnnnnnnnnnnnnnnnnnnnnnnnnnnnnnnnnnnnnnnnnnnnnnnnnnnnnnnnnnnnnnnnnnnnnnnnnnnnnnnnnnnnnnnnnnnnnnnnnnnnnnnnnnnnnnnnnnnnnnnnnnnnnnnnnnnnnnnnnnnnnnnnnnnnnnnnnnnnnnnnnnnnnnnnnnnnnnnnnnnnnnnnnnnnnnnnnnnnnnnnnnnnnnnnnnnnnnnnnnnnnnnnnnnnnnnnnnnnnnnnnnnnnnnnnnnnnnnnnnnnnnnnnnnnnnnnnnnnnnnnnnnnnnnnnnnnnnnnnnnnnnnnnnnnnnnnnnnnnnnnnnnnnnnnnnnnnnnnnnnnnnnnnnnnnnnnnnnnnnnnnnnnnnnnnnnnnnnnnnnnnnnnnnnnnnnnnnnnnnnnnnnnnnnnnnnnnnnnnnnnnnnnnnnnnnnnnnnnnnnnnnnnnnnnnnnnnnnnnnnnnnnnnnnnnnnnnnnnnnnnnnnnnnnnnnnnnnnnnnnnnnnnnnnnnnnnnnnnnnnnnnnnnnnnnnnnnnnnnnnnnnnnnnnnnnnnnnnnnnnnnnnnnnnnnnnnnnnnnnnnnnnnnnnnnnnnnnnnnnnnnnnnnnnnnnnnnnnnnnnnnnnnnnnnnnnnnnnnnnnnnnnnnnnnnnnnnnnnnnnnnnnnnnnnnnnnnnnnnnnnnnnnnnnnnnnnnnnnnnnnnnnnnnnnnnnnnnnnnnnnnnnnnnnnnnnnnnnnnnnnnnnnnnnnnnnnnnnnnnnnnnnnnnnnnnnnnnnnnnnnnnnnnnnnnnnnnnnnnnnnnnnnnnnnnnnnnnnnnnnnnnnnnnnnnnnnnnnnnnnnnnnnnnnnnnnnnnnnnnnnnnnnnnnnnnnnnnnnnnnnnnnnnnnnnnnnnnnnnnnnnnnnnnnnnnnnnnnnnnnnnnnnnnnnnnnnnnnnnnnnnnnnnnnnnnnnnnnnnnnnnnnnnnnnnnnnnnnnnnnnnnnnnnnnnnnnnnnnnnnnnnnnnnnnnnnnnnnnnnnnnnnnnnnnnnnnnnnnnnnnnnnnnnnnnnnnnnnnnnnnnnnnnnnnnnnnnnnnnnnnnnnnnnnnnnnnnnnnnnnnnnnnnnnnnnnnnnnnnnnnnnnnnnnnnnnnnnnnnnnnnnnnnnnnnnnnnnnnnnnnnnnnnnnnnnnnnnnnnnnnnnnnnnnnnnnnnnnnnnnnnnnnnnnnnnnnnnnnnnnnnnnnnnnnnnnnnnnnnnnnnnnnnnnnnnnnnnnnnnnnnnnnnnnnnnnnnnnnnnnnnnnnnnnnnnnnnnnnnnnnnnnnnnnnnnnnnnnnnnnnnnnnnnnnnnnnnnnnnnnnnnnnnnnnnnnnnnnnnnnnnnnnnnnnnnnnnnnnnnnnnnnnnnnnnnnnnnnnnnnnnnnnnnnnnnnnnnnnnnnnnnnnnnnnnnnnnnnnnnnnnnnnnnnnnnnnnnnnnnnnnnnnnnnnnnnnnnnnnnnnnnnnnnnnnnnnnnnnnnnnnnnnnnnnnnnnnnnnnnnnnnnnnnnnnnnnnnnnnnnnnnnnnnnnnnnnnnnnnnnnnnnnnnnnnnnnnnnnnnnnnnnnnnnnnnnnnnnnnnnnnnnnnnnnnnnnnnnnnnnnnnnnnnnnnnnnnnnnnnnnnnnnnnnnnnnnnnnnnnnnnnnnnnnnnnnnnnnnnnnnnnnnnnnnnnnnnnnnnnnnnnnnnnnnnnnnnnnnnnnnnnnnnnnnnnnnnnnnnnnnnnnnnnnnnnnnnnnnnnnnnnnnnnnnnnnnnnnnnnnnnnnnnnnnnnnnnnnnnnnnnnnnnnnnnnnnnnnnnnnnnnnnnnnnnnnnnnnnnnnnnnnnnnnnnnnnnnnnnnnnnnnnnnnnnnnnnnnnnnnnnnnnnnnnnnnnnnnnnnnnnnnnnnnnnnnnnnnnnnnnnnnnnnnnnnnnnnnnnnnnnnnnnnnnnnnnnnnnnnnnnnnnnnnnnnnnnnnnnnnnnnnnnnnnnnnnnnnnnnnnnnnnnnnnnnnnnnnnnnnnnnnnnnnnnnnnnnnnnnnnnnnnnnnnnnnnnnnnnnnnnnnnnnnnnnnnnnnnnnnnnnnnnnnnnnnnnnnnnnnnnnnnnnnnnnnnnnnnnnnnnnnnnnnnnnnnnnnnnnnnnnnnnnnnnnnnnnnnnnnnnnnnnnnnnnnnnnnnnnnnnnnnnnnnnnnnnnnnnnnnnnnnnnnnnnnnnnnnnnnnnnnnnnnnnnnnnnnnnnnnnnnnnnnnnnnnnnnnnnnnnnnnnnnnnnnnnnnnnnnnnnnnnnnnnnnnnnnnnnnnnnnnnnnnnnnnnnnnnnnnnnnnnnnnnnnnnnnnnnnnnnnnnnnnnnnnnnnnnnnnnnnnnnnnnnnnnnnnnnnnnnnnnnnnnnnnnnnnnnnnnnnnnnnnnnnnnnnnnnnnnnnnnnnnnnnnnnnnnnnnnnnnnnnnnnnnnnnnnnnnnnnnnnnnnnnnnnnnnnnnnnnnnnnnnnnnnnnnnnnnnnnnnnnnnnnnnnnnnnnnnnnnnnnnnnnnnnnnnnnnnnnnnnnnnnnnnnnnnnnnnnnnnnnnnnnnnnnnnnnnnnnnnnnnnnnnnnnnnnnnnnnnnnnnnnnnnnnnnnnnnnnnnnnnnnnnnnnnnnnnnnnnnnnnnnnnnnnnnnnnnnnnnnnnnnnnnnnnnnnnnnnnnnnnnnnnnnnnnnnnnnnnnnnnnnnnnnnnnnnnnnnnnnnnnnnnnnnnnnnnnnnnnnnnnnnnnnnnnnnnnnnnnnnnnnnnnnnnnnnnnnnnnnnnnnnnnnnnnnnnnnnnnnnnnnnnnnnnnnnnnnnnnnnnnnnnnnnnnnnnnnnnnnnnnnnnnnnnnnnnnnnnnnnnnnnnnnnnnnnnnnnnnnnnnnnnnnnnnnnnnnnnnnnnnnnnnnnnnnnnnnnnnnnnnnnnnnnnnnnnnnnnnnnnnnnnnnnnnnnnnnnnnnnnnnnnnnnnnnnnnnnnnnnnnnnnnnnnnnnnnnnnnnnnnnnnnnnnnnnnnnnnnnnnnnnnnnnnnnnnnnnnnnnnnnnnnnnnnnnnnnnnnnnnnnnnnnnnnnnnnnnnnnnnnnnnnnnnnnnnnnnnnnnnnnnnnnnnnnnnnnnnnnnnnnnnnnnnnnnnnnnnnnnnnnnnnnnnnnnnnnnnnnnnnnnnnnnnnnnnnnnnnnnnnnnnnnnnnnnnnnnnnnnnnnnnnnnnnnnnnnnnnnnnnnnnnnnnnnnnnnnnnnnnnnnnnnnnnnnnnnnnnnnnnnnnnnnnnnnnnnnnnnnnnnnnnnnnnnnnnnnnnnnnnnnnnnnnnnnnnnnnnnnnnnnnnnnnnnnnnnnnnnnnnnnnnnnnnnnnnnnnnnnnnnnnnnnnnnnnnnnnnnnnnnnnnnnnnnnnnnnnnnnnnnnnnnnnnnnnnnnnnnnnnnnnnnnnnnnnnnnnnnnnnnnnnnnnnnnnnnnnnnnnnnnnnnnnnnnnnnnnnnnnnnnnnnnnnnnnnnnnnnnnnnnnnnnnnnnnnnnnnnnnnnnnnnnnnnnnnnnnnnnnnnnnnnnnnnnnnnnnnnnnnnnnnnnnnnnnnnnnnnnnnnnnnnnnnnnnnnnnnnnnnnnnnnnnnnnnnnnnnnnnnnnnnnnnnnnnnnnnnnnnnnnnnnnnnnnnnnnnnnnnnnnnnnnnnnnnnnnnnnnnnnnnnnnnnnnnnnnnnnnnnnnnnnnnnnnnnnnnnnnnnnnnnnnnnnnnnnnnnnnnnnnnnnnnnnnnnnnnnnnnnnnnnnnnnnnnnnnnnnnnnnnnnnnnnnnnnnnnnnnnnnnnnnnnnnnnnnnnnnnnnnnnnnnnnnnnnnnnnnnnnnnnnnnnnnnnnnnnnnnnnnnnnnnnnnnnnnnnnnnnnnnnnnnnnnnnnnnnnnnnnnnnnnnnnnnnnnnnnnnnnnnnnnnnnnnnnnnnnnnnnnnnnnnnnnnnnnnnnnnnnnnnnnnnnnnnnnnnnnnnnnnnnnnnnnnnnnnnnnnnnnnnnnnnnnnnnnnnnnnnnnnnnnnnnnnnnnnnnnnnnnnnnnnnnnnnnnnnnnnnnnnnnnnnnnnnnnnnnnnnnnnnnnnnnnnnnnnnnnnnnnnnnnnnnnnnnnnnnnnnnnnnnnnnnnnnnnnnnnnnnnnnnnnnnnnnnnnnnnnnnnnnnnnnnnnnnnnnnnnnnnnnnnnnnnnnnnnnnnnnnnnnnnnnnnnnnnnnnnnnnnnnnnnnnnnnnnnnnnnnnnnnnnnnnnnnnnnnnnnnnnnnnnnnnnnnnnnnnnnnnnnnnnnnnnnnnnnnnnnnnnnnnnnnnnnnnnnnnnnnnnnnnnnnnnnnnnnnnnnnnnnnnnnnnnnnnnnnnnnnnnnnnnnnnnnnnnnnnnnnnnnnnnnnnnnnnnnnnnnnnnnnnnnnnnnnnnnnnnnnnnnnnnnnnnnnnnnnnnnnnnnnnnnnnnnnnnnnnnnnnnnnnnnnnnnnnnnnnnnnnnnnnnnnnnnnnnnnnnnnnnnnnnnnnnnnnnnnnnnnnnnnnnnnnnnnnnnnnnnnnnnnnnnnnnnnnnnnnnnnnnnnnnnnnnnnnnnnnnnnnnnnnnnnnnnnnnnnnnnnnnnnnnnnnnnnnnnnnnnnnnnnnnnnnnnnnnnnnnnnnnnnnnnnnnnnnnnnnnnnnnnnnnnnnnnnnnnnnnnnnnnnnnnnnnnnnnnnnnnnnnnnnnnnnnnnnnnnnnnnnnnnnnnnnnnnnnnnnnnnnnnnnnnnnnnnnnnnnnnnnnnnnnnnnnnnnnnnnnnnnnnnnnnnnnnnnnnnnnnnnnnnnnnnnnnnnnnnnnnnnnnnnnnnnnnnnnnnnnnnnnnnnnnnnnnnnnnnnnnnnnnnnnnnnnnnnnnnnnnnnnnnnnnnnnnnnnnnnnnnnnnnnnnnnnnnnnnnnnnnnnnnnnnnnnnnnnnnnnnnnnnnnnnnnnnnnnnnnnnnnnnnnnnnnnnnnnnnnnnnnnnnnnnnnnnnnnnnnnnnnnnnnnnnnnnnnnnnnnnnnnnnnnnnnnnnnnnnnnnnnnnnnnnnnnnnnnnnnnnnnnnnnnnnnnnnnnnnnnnnnnnnnnnnnnnnnnnnnnnnnnnnnnnnnnnnnnnnnnnnnnnnnnnnnnnnnnnnnnnnnnnnnnnnnnnnnnnnnnnnnnnnnnnnnnnnnnnnnnnnnnnnnnnnnnnnnnnnnnnnnnnnnnnnnnnnnnnnnnnnnnnnnnnnnnnnnnnnnnnnnnnnnnnnnnnnnnnnnnnnnnnnnnnnnnnnnnnnnnnnnnnnnnnnnnnnnnnnnnnnnnnnnnnnnnnnnnnnnnnnnnnnnnnnnnnnnnnnnnnnnnnnnnnnnnnnnnnnnnnnnnnnnnnnnnnnnnnnnnnnnnnnnnnnnnnnnnnnnnnnnnnnnnnnnnnnnnnnnnnnnnnnnnnnnnnnnnnnnnnnnnnnnnnnnnnnnnnnnnnnnnnnnnnnnnnnnnnnnnnnnnnnnnnnnnnnnnnnnnnnnnnnnnnnnnnnnnnnnnnnnnnnnnnnnnnnnnnnnnnnnnnnnnnnnnnnnnnnnnnnnnnnnnnnnnnnnnnnnnnnnnnnnnnnnnnnnnnnnnnnnnnnnnnnnnnnnnnnnnnnnnnnnnnnnnnnnnnnnnnnnnnnnnnnnnnnnnnnnnnnnnnnnnnnnnnnnnnnnnnnnnnnnnnnnnnnnnnnnnnnnnnnnnnnnnnnnnnnnnnnnnnnnnnnnnnnnnnnnnnnnnnnnnnnnnnnnnnnnnnnnnnnnnnnnnnnnnnnnnnnnnnnnnnnnnnnnnnnnnnnnnnnnnnnnnnnnnnnnnnnnnnnnnnnnnnnnnnnnnnnnnnnnnnnnnnnnnnnnnnnnnnnnnnnnnnnnnnnnnnnnnnnnnnnnnnnnnnnnnnnnnnnnnnnnnnnnnnnnnnnnnnnnnnnnnnnnnnnnnnnnnnnnnnnnnnnnnnnnnnnnnnnnnnnnnnnnnnnnnnnnnnnnnnnnnnnnnnnnnnnnnnnnnnnnnnnnnnnnnnnnnnnnnnnnnnnnnnnnnnnnnnnnnnnnnnnnnnnnnnnnnnnnnnnnnnnnnnnnnnnnnnnnnnnnnnnnnnnnnnnnnnnnnnnnnnnnnnnnnnnnnnnnnnnnnnnnnnnnnnnnnnnnnnnnnnnnnnnnnnnnnnnnnnnnnnnnnnnnnnnnnnnnnnnnnnnnnnnnnnnnnnnnnnnnnnnnnnnnnnnnnnnnnnnnnnnnnnnnnnnnnnnnnnnnnnnnnnnnnnnnnnnnnnnnnnnnnnnnnnnnnnnnnnnnnnnnnnnnnnnnnnnnnnnnnnnnnnnnnnnnnnnnnnnnnnnnnnnnnnnnnnnnnnnnnnnnnnnnnnnnnnnnnnnnnnnnnnnnnnnnnnnnnnnnnnnnnnnnnnnnnnnnnnnnnnnnnnnnnnnnnnnnnnnnnnnnnnnnnnnnnnnnnnnnnnnnnnnnnnnnnnnnnnnnnnnnnnnnnnnnnnnnnnnnnnnnnnnnnnnnnnnnnnnnnnnnnnnnnnnnnnnnnnnnnnnnnnnnnnnnnnnnnnnnnnnnnnnnnnnnnnnnnnnnnnnnnnnnnnnnnnnnnnnnnnnnnnnnnnnnnnnnnnnnnnnnnnnnnnnnnnnnnnnnnnnnnnnnnnnnnnnnnnnnnnnnnnnnnnnnnnnnnnnnnnnnnnnnnnnnnnnnnnnnnnnnnnnnnnnnnnnnnnnnnnnnnnnnnnnnnnnnnnnnnnnnnnnnnnnnnnnnnnnnnnnnnnnnnnnnnnnnnnnnnnnnnnnnnnnnnnnnnnnnnnnnnnnnnnnnnnnnnnnnnnnnnnnnnnnnnnnnnnnnnnnnnnnnnnnnnnnnnnnnnnnnnnnnnnnnnnnnnnnnnnnnnnnnnnnnnnnnnnnnnnnnnnnnnnnnnnnnnnnnnnnnnnnnnnnnnnnnnnnnnnnnnnnnnnnnnnnnnnnnnnnnnnnnnnnnnnnnnnnnnnnnnnnnnnnnnnnnnnnnnnnnnnnnnnnnnnnnnnnnnnnnnnnnnnnnnnnnnnnnnnnnnnnnnnnnnnnnnnnnnnnnnnnnnnnnnnnnnnnnnnnnnnnnnnnnnnnnnnnnnnnnnnnnnnnnnnnnnnnnnnnnnnnnnnnnnnnnnnnnnnnnnnnnnnnnnnnnnnnnnnnnnnnnnnnnnnnnnnnnnnnnnnnnnnnnnnnnnnnnnnnnnnnnnnnnnnnnnnnnnnnnnnnnnnnnnnnnnnnnnnnnnnnnnnnnnnnnnnnnnnnnnnnnnnnnnnnnnnnnnnnnnnnnnnnnnnnnnnnnnnnnnnnnnnnnnnnnnnnnnnnnnnnnnnnnnnnnnnnnnnnnnnnnnnnnnnnnnnnnnnnnnnnnnnnnnnnnnnnnnnnnnnnnnnnnnnnnnnnnnnnnnnnnnnnnnnnnnnnnnnnnnnnnnnnnnnnnnnnnnnnnnnnnnnnnnnnnnnnnnnnnnnnnnnnnnnnnnnnnnnnnnnnnnnnnnnnnnnnnnnnnnnnnnnnnnnnnnnnnnnnnnnnnnnnnnnnnnnnnnnnnnnnnnnnnnnnnnnnnnnnnnnnnnnnnnnnnnnnnnnnnnnnnnnnnnnnnnnnnnnnnnnnnnnnnnnnnnnnnnnnnnnnnnnnnnnnnnnnnnnnnnnnnnnnnnnnnnnnnnnnnnnnnnnnnnnnnnnnnnnnnnnnnnnnnnnnnnnnnnnnnnnnnnnnnnnnnnnnnnnnnnnnnnnnnnnnnnnnnnnnnnnnnnnnnnnnnnnnnnnnnnnnnnnnnnnnnnnnnnnnnnnnnnnnnnnnnnnnnnnnnnnnnnnnnnnnnnnnnnnnnnnnnnnnnnnnnnnnnnnnnnnnnnnnnnnnnnnnnnnnnnnnnnnnnnnnnnnnnnnnnnnnnnnnnnnnnnnnnnnnnnnnnnnnnnnnnnnnnnnnnnnnnnnnnnnnnnnnnnnnnnnnnnnnnnnnnnnnnnnnnnnnnnnnnnnnnnnnnnnnnnnnnnnnnnnnnnnnnnnnnnnnnnnnnnnnnnnnnnnnnnnnnnnnnnnnnnnnnnnnnnnnnnnnnnnnnnnnnnnnnnnnnnnnnnnnnnnnnnnnnnnnnnnnnnnnnnnnnnnnnnnnnnnnnnnnnnnnnnnnnnnnnnnnnnnnnnnnnnnnnnnnnnnnnnnnnnnnnnnnnnnnnnnnnnnnnnnnnnnnnnnnnnnnnnnnnnnnnnnnnnnnnnnnnnnnnnnnnnnnnnnnnnnnnnnnnnnnnnnnnnnnnnnnnnnnnnnnnnnnnnnnnnnnnnnnnnnnnnnnnnnnnnnnnnnnnnnnnnnnnnnnnnnnnnnnnnnnnnnnnnnnnnnnnnnnnnnnnnnnnnnnnnnnnnnnnnnnnnnnnnnnnnnnnnnnnnnnnnnnnnnnnnnnnnnnnnnnnnnnnnnnnnnnnnnnnnnnnnnnnnnnnnnnnnnnnnnnnnnnnnnnnnnnnnnnnnnnnnnnnnnnnnnnnnnnnnnnnnnnnnnnnnnnnnnnnnnnnnnnnnnnnnnnnnnnnnnnnnnnnnnnnnnnnnnnnnnnnnnnnnnnnnnnnnnnnnnnnnnnnnnnnnnnnnnnnnnnnnnnnnnnnnnnnnnnnnnnnnnnnnnnnnnnnnnnnnnnnnnnnnnnnnnnnnnnnnnnnnnnnnnnnnnnnnnnnnnnnnnnnnnnnnnnnnnnnnnnnnnnnnnnnnnnnnnnnnnnnnnnnnnnnnnnnnnnnnnnnnnnnnnnnnnnnnnnnnnnnnnnnnnnnnnnnnnnnnnnnnnnnnnnnnnnnnnnnnnnnnnnnnnnnnnnnnnnnnnnnnnnnnnnnnnnnnnnnnnnnnnnnnnnnnnnnnnnnnnnnnnnnnnnnnnnnnnnnnnnnnnnnnnnnnnnnnnnnnnnnnnnnnnnnnnnnnnnnnnnnnnnnnnnnnnnnnnnnnnnnnnnnnnnnnnnnnnnnnnnnnnnnnnnnnnnnnnnnnnnnnnnnnnnnnnnnnnnnnnnnnnnnnnnnnnnnnnnnnnnnnnnnnnnnnnnnnnnnnnnnnnnnnnnnnnnnnnnnnnnnnnnnnnnnnnnnnnnnnnnnnnnnnnnnnnnnnnnnnnnnnnnnnnnnnnnnnnnnnnnnnnnnnnnnnnnnnnnnnnnnnnnnnnnnnnnnnnnnnnnnnnnnnnnnnnnnnnnnnnnnnnnnnnnnnnnnnnnnnnnnnnnnnnnnnnnnnnnnnnnnnnnnnnnnnnnnnnnnnnnnnnnnnnnnnnnnnnnnnnnnnnnnnnnnnnnnnnnnnnnnnnnnnnnnnnnnnnnnnnnnnnnnnnnnnnnnnnnnnnnnnnnnnnnnnnnnnnnnnnnnnnnnnnnnnnnnnnnnnnnnnnnnnnnnnnnnnnnnnnnnnnnnnnnnnnnnnnnnnnnnnnnnnnnnnnnnnnnnnnnnnnnnnnnnnnnnnnnnnnnnnnnnnnnnnnnnnnnnnnnnnnnnnnnnnnnnnnnnnnnnnnnnnnnnnnnnnnnnnnnnnnnnnnnnnnnnnnnnnnnnnnnnnnnnnnnnnnnnnnnnnnnnnnnnnnnnnnnnnnnnnnnnnnnnnnnnnnnnnnnnnnnnnnnnnnnnnnnnnnnnnnnnnnnnnnnnnnnnnnnnnnnnnnnnnnnnnnnnnnnnnnnnnnnnnnnnnnnnnnnnnnnnnnnnnnnnnnnnnnnnnnnnnnnnnnnnnnnnnnnnnnnnnnnnnnnnnnnnnnnnnnnnnnnnnnnnnnnnnnnnnnnnnnnnnnnnnnnnnnnnnnnnnnnnnnnnnnnnnnnnnnnnnnnnnnnnnnnnnnnnnnnnnnnnnnnnnnnnnnnnnnnnnnnnnnnnnnnnnnnnnnnnnnnnnnnnnnnnnnnnnnnnnnnnnnnnnnnnnnnnnnnnnnnnnnnnnnnnnnnnnnnnnnnnnnnnnnnnnnnnnnnnnnnnnnnnnnnnnnnnnnnnnnnnnnnnnnnnnnnnnnnnnnnnnnnnnnnnnnnnnnnnnnnnnnnnnnnnnnnnnnnnnnnnnnnnnnnnnnnnnnnnnnnnnnnnnnnnnnnnnnnnnnnnnnnnnnnnnnnnnnnnnnnnnnnnnnnnnnnnnnnnnnnnnnnnnnnnnnnnnnnnnnnnnnnnnnnnnnnnnnnnnnnnnnnnnnnnnnnnnnnnnnnnnnnnnnnnnnnnnnnnnnnnnnnnnnnnnnnnnnnnnnnnnnnnnnnnnnnnnnnnnnnnnnnnnnnnnnnnnnnnnnnnnnnnnnnnnnnnnnnnnnnnnnnnnnnnnnnnnnnnnnnnnnnnnnnnnnnnnnnnnnnnnnnnnnnnnnnnnnnnnnnnnnnnnnnnnnnnnnnnnnnnnnnnnnnnnnnnnnnnnnnnnnnnnnnnnnnnnnnnnnnnnnnnnnnnnnnnnnnnnnnnnnnnnnnnnnnnnnnnnnnnnnnnnnnnnnnnnnnnnnnnnnnnnnnnnnnnnnnnnnnnnnnnnnnnnnnnnnnnnnnnnnnnnnnnnnnnnnnnnnnnnnnnnnnnnnnnnnnnnnnnnnnnnnnnnnnnnnnnnnnnnnnnnnnnnnnnnnnnnnnnnnnnnnnnnnnnnnnnnnnnnnnnnnnnnnnnnnnnnnnnnnnnnnnnnnnnnnnnnnnnnnnnnnnnnnnnnnnnnnnnnnnnnnnnnnnnnnnnnnnnnnnnnnnnnnnnnnnnnnnnnnnnnnnnnnnnnnnnnnnnnnnnnnnnnnnnnnnnnnnnnnnnnnnnnnnnnnnnnnnnnnnnnnnnnnnnnnnnnnnnnnnnnnnnnnnnnnnnnnnnnnnnnnnnnnnnnnnnnnnnnnnnnnnnnnnnnnnnnnnnnnnnnnnnnnnnnnnnnnnnnnnnnnnnnnnnnnnnnnnnnnnnnnnnnnnnnnnnnnnnnnnnnnnnnnnnnnnnnnnnnnnnnnnnnnnnnnnnnnnnnnnnnnnnnnnnnnnnnnnnnnnnnnnnnnnnnnnnnnnnnnnnnnnnnnnnnnnnnnnnnnnnnnnnnnnnnnnnnnnnnnnnnnnnnnnnnnnnnnnnnnnnnnnnnnnnnnnnnnnnnnnnnnnnnnnnnnnnnnnnnnnnnnnnnnnnnnnnnnnnnnnnnnnnnnnnnnnnnnnnnnnnnnnnnnnnnnnnnnnnnnnnnnnnnnnnnnnnnnnnnnnnnnnnnnnnnnnnnnnnnnnnnnnnnnnnnnnnnnnnnnnnnnnnnnnnnnnnnnnnnnnnnnnnnnnnnnnnnnnnnnnnnnnnnnnnnnnnnnnnnnnnnnnnnnnnnnnnnnnnnnnnnnnnnnnnnnnnnnnnnnnnnnnnnnnnnnnnnnnnnnnnnnnnnnnnnnnnnnnnnnnnnnnnnnnnnnnnnnnnnnnnnnnnnnnnnnnnnnnnnnnnnnnnnnnnnnnnnnnnnnnnnnnnnnnnnnnnnnnnnnnnnnnnnnnnnnnnnnnnnnnnnnnnnnnnnnnnnnnnnnnnnnnnnnnnnnnnnnnnnnnnnnnnnnnnnnnnnnnnnnnnnnnnnnnnnnnnnnnnnnnnnnnnnnnnnnnnnnnnnnnnnnnnnnnnnnnnnnnnnnnnnnnnnnnnnnnnnnnnnnnnnnnnnnnnnnnnnnnnnnnnnnnnnnnnnnnnnnnnnnnnnnnnnnnnnnnnnnnnnnnnnnnnnnnnnnnnnnnnnnnnnnnnnnnnnnnnnnnnnnnnnnnnnnnnnnnnnnnnnnnnnnnnnnnnnnnnnnnnnnnnnnnnnnnnnnnnnnnnnnnnnnnnnnnnnnnnnnnnnnnnnnnnnnnnnnnnnnnnnnnnnnnnnnnnnnnnnnnnnnnnnnnnnnnnnnnnnnnnnnnnnnnnnnnnnnnnnnnnnnnnnnnnnnnnnnnnnnnnnnnnnnnnnnnnnnnnnnnnnnnnnnnnnnnnnnnnnnnnnnnnnnnnnnnnnnnnnnnnnnnnnnnnnnnnnnnnnnnnnnnnnnnnnnnnnnnnnnnnnnnnnnnnnnnnnnnnnnnnnnnnnnnnnnnnnnnnnnnnnnnnnnnnnnnnnnnnnnnnnnnnnnnnnnnnnnnnnnnnnnnnnnnnnnnnnnnnnnnnnnnnnnnnnnnnnnnnnnnnnnnnnnnnnnnnnnnnnnnnnnnnnnnnnnnnnnnnnnnnnnnnnnnnnnnnnnnnnnnnnnnnnnnnnnnnnnnnnnnnnnnnnnnnnnnnnnnnnnnnnnnnnnnnnnnnnnnnnnnnnnnnnnnnnnnnnnnnnnnnnnnnnnnnnnnnnnnnnnnnnnnnnnnnnnnnnnnnnnnnnnnnnnnnnnnnnnnnnnnnnnnnnnnnnnnnnnnnnnnnnnnnnnnnnnnnnnnnnnnnnnnnnnnnnnnnnnnnnnnnnnnnnnnnnnnnnnnnnnnnnnnnnnnnnnnnnnnnnnnnnnnnnnnnnnnnnnnnnnnnnnnnnnnnnnnnnnnnnnnnnnnnnnnnnnnnnnnnnnnnnnnnnnnnnnnnnnnnnnnnnnnnnnnnnnnnnnnnnnnnnnnnnnnnnnnnnnnnnnnnnnnnnnnnnnnnnnnnnnnnnnnnnnnnnnnnnnnnnnnnnnnnnnnnnnnnnnnnnnnnnnnnnnnnnnnnnnnnnnnnnnnnnnnnnnnnnnnnnnnnnnnnnnnnnnnnnnnnnnnnnnnnnnnnnnnnnnnnnnnnnnnnnnnnnnnnnnnnnnnnnnnnnnnnnnnnnnnnnnnnnnnnnnnnnnnnnnnnnnnnnnnnnnnnnnnnnnnnnnnnnnnnnnnnnnnnnnnnnnnnnnnnnnnnnnnnnnnnnnnnnnnnnnnnnnnnnnnnnnnnnnnnnnnnnnnnnnnnnnnnnnnnnnnnnnnnnnnnnnnnnnnnnnnnnnnnnnnnnnnnnnnnnnnnnnnnnnnnnnnnnnnnnnnnnnnnnnnnnnnnnnnnnnnnnnnnnnnnnnnnnnnnnnnnnnnnnnnnnnnnnnnnnnnnnnnnnnnnnnnnnnnnnnnnnnnnnnnnnnnnnnnnnnnnnnnnnnnnnnnnnnnnnnnnnnnnnnnnnnnnnnnnnnnnnnnnnnnnnnnnnnnnnnnnnnnnnnnnnnnnnnnnnnnnnnnnnnnnnnnnnnnnnnnnnnnnnnnnnnnnnnnnnnnnnnnnnnnnnnnnnnnnnnnnnnnnnnnnnnnnnnnnnnnnnnnnnnnnnnnnnnnnnnnnnnnnnnnnnnnnnnnnnnnnnnnnnnnnnnnnnnnnnnnnnnnnnnnnnnnnnnnnnnnnnnnnnnnnnnnnnnnnnnnnnnnnnnnnnnnnnnnnnnnnnnnnnnnnnnnnnnnnnnnnnnnnnnnnnnnnnnnnnnnnnnnnnnnnnnnnnnnnnnnnnnnnnnnnnnnnnnnnnnnnnnnnnnnnnnnnnnnnnnnnnnnnnnnnnnnnnnnnnnnnnnnnnnnnnnnnnnnnnnnnnnnnnnnnnnnnnnnnnnnnnnnnnnnnnnnnnnnnnnnnnnnnnnnnnnnnnnnnnnnnnnnnnnnnnnnnnnnnnnnnnnnnnnnnnnnnnnnnnnnnnnnnnnnnnnnnnnnnnnnnnnnnnnnnnnnnnnnnnnnnnnnnnnnnnnnnnnnnnnnnnnnnnnnnnnnnnnnnnnnnnnnnnnnnnnnnnnnnnnnnnnnnnnnnnnnnnnnnnnnnnnnnnnnnnnnnnnnnnnnnnnnnnnnnnnnnnnnnnnnnnnnnnnnnnnnnnnnnnnnnnnnnnnnnnnnnnnnnnnnnnnnnnnnnnnnnnnnnnnnnnnnnnnnnnnnnnnnnnnnnnnnnnnnnnnnnnnnnnnnnnnnnnnnnnnnnnnnnnnnnnnnnnnnnnnnnnnnnnnnnnnnnnnnnnnnnnnnnnnnnnnnnnnnnnnnnnnnnnnnnnnnnnnnnnnnnnnnnnnnnnnnnnnnnnnnnnnnnnnnnnnnnnnnnnnnnnnnnnnnnnnnnnnnnnnnnnnnnnnnnnnnnnnnnnnnnnnnnnnnnnnnnnnnnnnnnnnnnnnnnnnnnnnnnnnnnnnnnnnnnnnnnnnnnnnnnnnnnnnnnnnnnnnnnnnnnnnnnnnnnnnnnnnnnnnnnnnnnnnnnnnnnnnnnnnnnnnnnnnnnnnnnnnnnnnnnnnnnnnnnnnnnnnnnnnnnnnnnnnnnnnnnnnnnnnnnnnnnnnnnnnnnnnnnnnnnnnnnnnnnnnnnnnnnnnnnnnnnnnnnnnnnnnnnnnnnnnnnnnnnnnnnnnnnnnnnnnnnnnnnnnnnnnnnnnnnnnnnnnnnnnnnnnnnnnnnnnnnnnnnnnnnnnnnnnnnnnnnnnnnnnnnnnnnnnnnnnnnnnnnnnnnnnnnnnnnnnnnnnnnnnnnnnnnnnnnnnnnnnnnnnnnnnnnnnnnnnnnnnnnnnnnnnnnnnnnnnnnnnnnnnnnnnnnnnnnnnnnnnnnnnnnnnnnnnnnnnnnnnnnnnnnnnnnnnnnnnnnnnnnnnnnnnnnnnnnnnnnnnnnnnnnnnnnnnnnnnnnnnnnnnnnnnnnnnnnnnnnnnnnnnnnnnnnnnnnnnnnnnnnnnnnnnnnnnnnnnnnnnnnnnnnnnnnnnnnnnnnnnnnnnnnnnnnnnnnnnnnnnnnnnnnnnnnnnnnnnnnnnnnnnnnnnnnnnnnnnnnnnnnnnnnnnnnnnnnnnnnnnnnnnnnnnnnnnnnnnnnnnnnnnnnnnnnnnnnnnnnnnnnnnnnnnnnnnnnnnnnnnnnnnnnnnnnnnnnnnnnnnnnnnnnnnnnnnnnnnnnnnnnnnnnnnnnnnnnnnnnnnnnnnnnnnnnnnnnnnnnnnnnnnnnnnnnnnnnnnnnnnnnnnnnnnnnnnnnnnnnnnnnnnnnnnnnnnnnnnnnnnnnnnnnnnnnnnnnnnnnnnnnnnnnnnnnnnnnnnnnnnnnnnnnnnnnnnnnnnnnnnnnnnnnnnnnnnnnnnnnnnnnnnnnnnnnnnnnnnnnnnnnnnnnnnnnnnnnnnnnnnnnnnnnnnnnnnnnnnnnnnnnnnnnnnnnnnnnnnnnnnnnnnnnnnnnnnnnnnnnnnnnnnnnnnnnnnnnnnnnnnnnnnnnnnnnnnnnnnnnnnnnnnnnnnnnnnnnnnnnnnnnnnnnnnnnnnnnnnnnnnnnnnnnnnnnnnnnnnnnnnnnnnnnnnnnnnnnnnnnnnnnnnnnnnnnnnnnnnnnnnnnnnnnnnnnnnnnnnnnnnnnnnnnnnnnnnnnnnnnnnnnnnnnnnnnnnnnnnnnnnnnnnnnnnnnnnnnnnnnnnnnnnnnnnnnnnnnnnnnnnnnnnnnnnnnnnnnnnnnnnnnnnnnnnnnnnnnnnnnnnnnnnnnnnnnnnnnnnnnnnnnnnnnnnnnnnnnnnnnnnnnnnnnnnnnnnnnnnnnnnnnnnnnnnnnnnnnnnnnnnnnnnnnnnnnnnnnnnnnnnnnnnnnnnnnnnnnnnnnnnnnnnnnnnnnnnnnnnnnnnnnnnnnnnnnnnnnnnnnnnnnnnnnnnnnnnnnnnnnnnnnnnnnnnnnnnnnnnnnnnnnnnnnnnnnnnnnnnnnnnnnnnnnnnnnnnnnnnnnnnnnnnnnnnnnnnnnnnnnnnnnnnnnnnnnnnnnnnnnnnnnnnnnnnnnnnnnnnnnnnnnnnnnnnnnnnnnnnnnnnnnnnnnnnnnnnnnnnnnnnnnnnnnnnnnnnnnnnnnnnnnnnnnnnnnnnnnnnnnnnnnnnnnnnnnnnnnnnnnnnnnnnnnnnnnnnnnnnnnnnnnnnnnnnnnnnnnnnnnnnnnnnnnnnnnnnnnnnnnnnnnnnnnnnnnnnnnnnnnnnnnnnnnnnnnnnnnnnnnnnnnnnnnnnnnnnnnnnnnnnnnnnnnnnnnnnnnnnnnnnnnnnnnnnnnnnnnnnnnnnnnnnnnnnnnnnnnnnnnnnnnnnnnnnnnnnnnnnnnnnnnnnnnnnnnnnnnnnnnnnnnnnnnnnnnnnnnnnnnnnnnnnnnnnnnnnnnnnnnnnnnnnnnnnnnnnnnnnnnnnnnnnnnnnnnnnnnnnnnnnnnnnnnnnnnnnnnnnnnnnnnnnnnnnnnnnnnnnnnnnnnnnnnnnnnnnnnnnnnnnnnnnnnnnnnnnnnnnnnnnnnnnnnnnnnnnnnnnnnnnnnnnnnnnnnnnnnnnnnnnnnnnnnnnnnnnnnnnnnnnnnnnnnnnnnnnnnnnnnnnnnnnnnnnnnnnnnnnnnnnnnnnnnnnnnnnnnnnnnnnnnnnnnnnnnnnnnnnnnnnnnnnnnnnnnnnnnnnnnnnnnnnnnnnnnnnnnnnnnnnnnnnnnnnnnnnnnnnnnnnnnnnnnnnnnnnnnnnnnnnnnnnnnnnnnnnnnnnnnnnnnnnnnnnnnnnnnnnnnnnnnnnnnnnnnnnnnnnnnnnnnnnnnnnnnnnnnnnnnnnnnnnnnnnnnnnnnnnnnnnnnnnnnnnnnnnnnnnnnnnnnnnnnnnnnnnnnnnnnnnnnnnnnnnnnnnnnnnnnnnnnnnnnnnnnnnnnnnnnnnnnnnnnnnnnnnnnnnnnnnnnnnnnnnnnnnnnnnnnnnnnnnnnnnnnnnnnnnnnnnnnnnnnnnnnnnnnnnnnnnnnnnnnnnnnnnnnnnnnnnnnnnnnnnnnnnnnnnnnnnnnnnnnnnnnnnnnnnnnnnnnnnnnnnnnnnnnnnnnnnnnnnnnnnnnnnnnnnnnnnnnnnnnnnnnnnnnnnnnnnnnnnnnnnnnnnnnnnnnnnnnnnnnnnnnnnnnnnnnnnnnnnnnnnnnnnnnnnnnnnnnnnnnnnnnnnnnnnnnnnnnnnnnnnnnnnnnnnnnnnnnnnnnnnnnnnnnnnnnnnnnnnnnnnnnnnnnnnnnnnnnnnnnnnnnnnnnnnnnnnnnnnnnnnnnnnnnnnnnnnnnnnnnnnnnnnnnnnnnnnnnnnnnnnnnnnnnnnnnnnnnnnnnnnnnnnnnnnnnnnnnnnnnnnnnnnnnnnnnnnnnnnnnnnnnnnnnnnnnnnnnnnnnnnnnnnnnnnnnnnnnnnnnnnnnnnnnnnnnnnnnnnnnnnnnnnnnnnnnnnnnnnnnnnnnnnnnnnnnnnnnnnnnnnnnnnnnnnnnnnnnnnnnnnnnnnnnnnnnnnnnnnnnnnnnnnnnnnnnnnnnnnnnnnnnnnnnnnnnnnnnnnnnnnnnnnnnnnnnnnnnnnnnnnnnnnnnnnnnnnnnnnnnnnnnnnnnnnnnnnnnnnnnnnnnnnnnnnnnnnnnnnnnnnnnnnnnnnnnnnnnnnnnnnnnnnnnnnnnnnnnnnnnnnnnnnnnnnnnnnnnnnnnnnnnnnnnnnnnnnnnnnnnnnnnnnnnnnnnnnnnnnnnnnnnnnnnnnnnnnnnnnnnnnnnnnnnnnnnnnnnnnnnnnnnnnnnnnnnnnnnnnnnnnnnnnnnnnnnnnnnnnnnnnnnnnnnnnnnnnnnnnnnnnnnnnnnnnnnnnnnnnnnnnnnnnnnnnnnnnnnnnnnnnnnnnnnnnnnnnnnnnnnnnnnnnnnnnnnnnnnnnnnnnnnnnnnnnnnnnnnnnnnnnnnnnnnnnnnnnnnnnnnnnnnnnnnnnnnnnnnnnnnnnnnnnnnnnnnnnnnnnnnnnnnnnnnnnnnnnnnnnnnnnnnnnnnnnnnnnnnnnnnnnnnnnnnnnnnnnnnnnnnnnnnnnnnnnnnnnnnnnnnnnnnnnnnnnnnnnnnnnnnnnnnnnnnnnnnnnnnnnnnnnnnnnnnnnnnnnnnnnnnnnnnnnnnnnnnnnnnnnnnnnnnnnnnnnnnnnnnnnnnnnnnnnnnnnnnnnnnnnnnnnnnnnnnnnnnnnnnnnnnnnnnnnnnnnnnnnnnnnnnnnnnnnnnnnnnnnnnnnnnnnnnnnnnnnnnnnnnnnnnnnnnnnnnnnnnnnnnnnnnnnnnnnnnnnnnnnnnnnnnnnnnnnnnnnnnnnnnnnnnnnnnnnnnnnnnnnnnnnnnnnnnnnnnnnnnnnnnnnnnnnnnnnnnnnnnnnnnnnnnnnnnnnnnnnnnnnnnnnnnnnnnnnnnnnnnnnnnnnnnnnnnnnnnnnnnnnnnnnnnnnnnnnnnnnnnnnnnnnnnnnnnnnnnnnnnnnnnnnnnnnnnnnnnnnnnnnnnnnnnnnnnnnnnnnnnnnnnnnnnnnnnnnnnnnnnnnnnnnnnnnnnnnnnnnnnnnnnnnnnnnnnnnnnnnnnnnnnnnnnnnnnnnnnnnnnnnnnnnnnnnnnnnnnnnnnnnnnnnnnnnnnnnnnnnnnnnnnnnnnnnnnnnnnnnnnnnnnnnnnnnnnnnnnnnnnnnnnnnnnnnnnnnnnnnnnnnnnnnnnnnnnnnnnnnnnnnnnnnnnnnnnnnnnnnnnnnnnnnnnnnnnnnnnnnnnnnnnnnnnnnnnnnnnnnnnnnnnnnnnnnnnnnnnnnnnnnnnnnnnnnnnnnnnnnnnnnnnnnnnnnnnnnnnnnnnnnnnnnnnnnnnnnnnnnnnnnnnnnnnnnnnnnnnnnnnnnnnnnnnnnnnnnnnnnnnnnnnnnnnnnnnnnnnnnnnnnnnnnnnnnnnnnnnnnnnnnnnnnnnnnnnnnnnnnnnnnnnnnnnnnnnnnnnnnnnnnnnnnnnnnnnnnnnnnnnnnnnnnnnnnnnnnnnnnnnnnnnnnnnnnnnnnnnnnnnnnnnnnnnnnnnnnnnnnnnnnnnnnnnnnnnnnnnnnnnnnnnnnnnnnnnnnnnnnnnnnnnnnnnnnnnnnnnnnnnnnnnnnnnnnnnnnnnnnnnnnnnnnnnnnnnnnnnnnnnnnnnnnnnnnnnnnnnnnnnnnnnnnnnnnnnnnnnnnnnnnnnnnnnnnnnnnnnnnnnnnnnnnnnnnnnnnnnnnnnnnnnnnnnnnnnnnnnnnnnnnnnnnnnnnnnnnnnnnnnnnnnnnnnnnnnnnnnnnnnnnnnnnnnnnnnnnnnnnnnnnnnnnnnnnnnnnnnnnnnnnnnnnnnnnnnnnnnnnnnnnnnnnnnnnnnnnnnnnnnnnnnnnnnnnnnnnnnnnnnnnnnnnnnnnnnnnnnnnnnnnnnnnnnnnnnnnnnnnnnnnnnnnnnnnnnnnnnnnnnnnnnnnnnnnnnnnnnnnnnnnnnnnnnnnnnnnnnnnnnnnnnnnnnnnnnnnnnnnnnnnnnnnnnnnnnnnnnnnnnnnnnnnnnnnnnnnnnnnnnnnnnnnnnnnnnnnnnnnnnnnnnnnnnnnnnnnnnnnnnnnnnnnnnnnnnnnnnnnnnnnnnnnnnnnnnnnnnnnnnnnnnnnnnnnnnnnnnnnnnnnnnnnnnnnnnnnnnnnnnnnnnnnnnnnnnnnnnnnnnnnnnnnnnnnnnnnnnnnnnnnnnnnnnnnnnnnnnnnnnnnnnnnnnnnnnnnnnnnnnnnnnnnnnnnnnnnnnnnnnnnnnnnnnnnnnnnnnnnnnnnnnnnnnnnnnnnnnnnnnnnnnnnnnnnnnnnnnnnnnnnnnnnnnnnnnnnnnnnnnnnnnnnnnnnnnnnnnnnnnnnnnnnnnnnnnnnnnnnnnnnnnnnnnnnnnnnnnnnnnnnnnnnnnnnnnnnnnnnnnnnnnnnnnnnnnnnnnnnnnnnnnnnnnnnnnnnnnnnnnnnnnnnnnnnnnnnnnnnnnnnnnnnnnnnnnnnnnnnnnnnnnnnnnnnnnnnnnnnnnnnnnnnnnnnnnnnnnnnnnnnnnnnnnnnnnnnnnnnnnnnnnnnnnnnnnnnnnnnnnnnnnnnnnnnnnnnnnnnnnnnnnnnnnnnnnnnnnnnnnnnnnnnnnnnnnnnnnnnnnnnnnnnnnnnnnnnnnnnnnnnnnnnnnnnnnnnnnnnnnnnnnnnnnnnnnnnnnnnnnnnnnnnnnnnnnnnnnnnnnnnnnnnnnnnnnnnnnnnnnnnnnnnnnnnnnnnnnnnnnnnnnnnnnnnnnnnnnnnnnnnnnnnnnnnnnnnnnnnnnnnnnnnnnnnnnnnnnnnnnnnnnnnnnnnnnnnnnnnnnnnnnnnnnnnnnnnnnnnnnnnnnnnnnnnnnnnnnnnnnnnnnnnnnnnnnnnnnnnnnnnnnnnnnnnnnnnnnnnnnnnnnnnnnnnnnnnnnnnnnnnnnnnnnnnnnnnnnnnnnnnnnnnnnnnnnnnnnnnnnnnnnnnnnnnnnnnnnnnnnnnnnnnnnnnnnnnnnnnnnnnnnnnnnnnnnnnnnnnnnnnnnnnnnnnnnnnnnnnnnnnnnnnnnnnnnnnnnnnnnnnnnnnnnnnnnnnnnnnnnnnnnnnnnnnnnnnnnnnnnnnnnnnnnnnnnnnnnnnnnnnnnnnnnnnnnnnnnnnnnnnnnnnnnnnnnnnnnnnnnnnnnnnnnnnnnnnnnnnnnnnnnnnnnnnnnnnnnnnnnnnnnnnnnnnnnnnnnnnnnnnnnnnnnnnnnnnnnnnnnnnnnnnnnnnnnnnnnnnnnnnnnnnnnnnnnnnnnnnnnnnnnnnnnnnnnnnnnnnnnnnnnnnnnnnnnnnnnnnnnnnnnnnnnnnnnnnnnnnnnnnnnnnnnnnnnnnnnnnnnnnnnnnnnnnnnnnnnnnnnnnnnnnnnnnnnnnnnnnnnnnnnnnnnnnnnnnnnnnnnnnnnnnnnnnnnnnnnnnnnnnnnnnnnnnnnnnnnnnnnnnnnnnnnnnnnnnnnnnnnnnnnnnnnnnnnnnnnnnnnnnnnnnnnnnnnnnnnnnnnnnnnnnnnnnnnnnnnnnnnnnnnnnnnnnnnnnnnnnnnnnnnnnnnnnnnnnnnnnnnnnnnnnnnnnnnnnnnnnnnnnnnnnnnnnnnnnnnnnnnnnnnnnnnnnnnnnnnnnnnnnnnnnnnnnnnnnnnnnnnnnnnnnnnnnnnnnnnnnnnnnnnnnnnnnnnnnnnnnnnnnnnnnnnnnnnnnnnnnnnnnnnnnnnnnnnnnnnnnnnnnnnnnnnnnnnnnnnnnnnnnnnnnnnnnnnnnnnnnnnnnnnnnnnnnnnnnnnnnnnnnnnnnnnnnnnnnnnnnnnnnnnnnnnnnnnnnnnnnnnnnnnnnnnnnnnnnnnnnnnnnnnnnnnnnnnnnnnnnnnnnnnnnnnnnnnnnnnnnnnnnnnnnnnnnnnnnnnnnnnnnnnnnnnnnnnnnnnnnnnnnnnnnnnnnnnnnnnnnnnnnnnnnnnnnnnnnnnnnnnnnnnnnnnnnnnnnnnnnnnnnnnnnnnnnnnnnnnnnnnnnnnnnnnnnnnnnnnnnnnnnnnnnnnnnnnnnnnnnnnnnnnnnnnnnnnnnnnnnnnnnnnnnnnnnnnnnnnnnnnnnnnnnnnnnnnnnnnnnnnnnnnnnnnnnnnnnnnnnnnnnnnnnnnnnnnnnnnnnnnnnnnnnnnnnnnnnnnnnnnnnnnnnnnnnnnnnnnnnnnnnnnnnnnnnnnnnnnnnnnnnnnnnnnnnnnnnnnnnnnnnnnnnnnnnnnnnnnnnnnnnnnnnnnnnnnnnnnnnnnnnnnnnnnnnnnnnnnnnnnnnnnnnnnnnnnnnnnnnnnnnnnnnnnnnnnnnnnnnnnnnnnnnnnnnnnnnnnnnnnnnnnnnnnnnnnnnnnnnnnnnnnnnnnnnnnnnnnnnnnnnnnnnnnnnnnnnnnnnnnnnnnnnnnnnnnnnnnnnnnnnnnnnnnnnnnnnnnnnnnnnnnnnnnnnnnnnnnnnnnnnnnnnnnnnnnnnnnnnnnnnnnnnnnnnnnnnnnnnnnnnnnnnnnnnnnnnnnnnnnnnnnnnnnnnnnnnnnnnnnnnnnnnnnnnnnnnnnnnnnnnnnnnnnnnnnnnnnnnnnnnnnnnnnnnnnnnnnnnnnnnnnnnnnnnnnnnnnnnnnnnnnnnnnnnnnnnnnnnnnnnnnnnnnnnnnnnnnnnnnnnnnnnnnnnnnnnnnnnnnnnnnnnnnnnnnnnnnnnnnnnnnnnnnnnnnnnnnnnnnnnnnnnnnnnnnnnnnnnnnnnnnnnnnnnnnnnnnnnnnnnnnnnnnnnnnnnnnnnnnnnnnnnnnnnnnnnnnnnnnnnnnnnnnnnnnnnnnnnnnnnnnnnnnnnnnnnnnnnnnnnnnnnnnnnnnnnnnnnnnnnnnnnnnnnnnnnnnnnnnnnnnnnnnnnnnnnnnnnnnnnnnnnnnnnnnnnnnnnnnnnnnnnnnnnnnnnnnnnnnnnnnnnnnnnnnnnnnnnnnnnnnnnnnnnnnnnnnnnnnnnnnnnnnnnnnnnnnnnnnnnnnnnnnnnnnnnnnnnnnnnnnnnnnnnnnnnnnnnnnnnnnnnnnnnnnnnnnnnnnnnnnnnnnnnnnnnnnnnnnnnnnnnnnnnnnnnnnnnnnnnnnnnnnnnnnnnnnnnnnnnnnnnnnnnnnnnnnnnnnnnnnnnnnnnnnnnnnnnnnnnnnnnnnnnnnnnnnnnnnnnnnnnnnnnnnnnnnnnnnnnnnnnnnnnnnnnnnnnnnnnnnnnnnnnnnnnnnnnnnnnnnnnnnnnnnnnnnnnnnnnnnnnnnnnnnnnnnnnnnnnnnnnnnnnnnnnnnnnnnnnnnnnnnnnnnnnnnnnnnnnnnnnnnnnnnnnnnnnnnnnnnnnnnnnnnnnnnnnnnnnnnnnnnnnnnnnnnnnnnnnnnnnnnnnnnnnnnnnnnnnnnnnnnnnnnnnnnnnnnnnnnnnnnnnnnnnnnnnnnnnnnnnnnnnnnnnnnnnnnnnnnnnnnnnnnnnnnnnnnnnnnnnnnnnnnnnnnnnnnnnnnnnnnnnnnnnnnnnnnnnnnnnnnnnnnnnnnnnnnnnnnnnnnnnnnnnnnnnnnnnnnnnnnnnnnnnnnnnnnnnnnnnnnnnnnnnnnnnnnnnnnnnnnnnnnnnnnnnnnnnnnnnnnnnnnnnnnnnnnnnnnnnnnnnnnnnnnnnnnnnnnnnnnnnnnnnnnnnnnnnnnnnnnnnnnnnnnnnnnnnnnnnnnnnnnnnnnnnnnnnnnnnnnnnnnnnnnnnnnnnnnnnnnnnnnnnnnnnnnnnnnnnnnnnnnnnnnnnnnnnnnnnnnnnnnnnnnnnnnnnnnnnnnnnnnnnnnnnnnnnnnnnnnnnnnnnnnnnnnnnnnnnnnnnnnnnnnnnnnnnnnnnnnnnnnnnnnnnnnnnnnnnnnnnnnnnnnnnnnnnnnnnnnnnnnnnnnnnnnnnnnnnnnnnnnnnnnnnnnnnnnnnnnnnnnnnnnnnnnnnnnnnnnnnnnnnnnnnnnnnnnnnnnnnnnnnnnnnnnnnnnnnnnnnnnnnnnnnnnnnnnnnnnnnnnnnnnnnnnnnnnnnnnnnnnnnnnnnnnnnnnnnnnnnnnnnnnnnnnnnnnnnnnnnnnnnnnnnnnnnnnnnnnnnnnnnnnnnnnnnnnnnnnnnnnnnnnnnnnnnnnnnnnnnnnnnnnnnnnnnnnnnnnnnnnnnnnnnnnnnnnnnnnnnnnnnnnnnnnnnnnnnnnnnnnnnnnnnnnnnnnnnnnnnnnnnnnnnnnnnnnnnnnnnnnnnnnnnnnnnnnnnnnnnnnnnnnnnnnnnnnnnnnnnnnnnnnnnnnnnnnnnnnnnnnnnnnnnnnnnnnnnnnnnnnnnnnnnnnnnnnnnnnnnnnnnnnnnnnnnnnnnnnnnnnnnnnnnnnnnnnnnnnnnnnnnnnnnnnnnnnnnnnnnnnnnnnnnnnnnnnnnnnnnnnnnnnnnnnnnnnnnnnnnnnnnnnnnnnnnnnnnnnnnnnnnnnnnnnnnnnnnnnnnnnnnnnnnnnnnnnnnnnnnnnnnnnnnnnnnnnnnnnnnnnnnnnnnnnnnnnnnnnnnnnnnnnnnnnnnnnnnnnnnnnnnnnnnnnnnnnnnnnnnnnnnnnnnnnnnnnnnnnnnnnnnnnnnnnnnnnnnnnnnnnnnnnnnnnnnnnnnnnnnnnnnnnnnnnnnnnnnnnnnnnnnnnnnnnnnnnnnnnnnnnnnnnnnnnnnnnnnnnnnnnnnnnnnnnnnnnnnnnnnnnnnnnnnnnnnnnnnnnnnnnnnnnnnnnnnnnnnnnnnnnnnnnnnnnnnnnnnnnnnnnnnnnnnnnnnnnnnnnnnnnnnnnnnnnnnnnnnnnnnnnnnnnnnnnnnnnnnnnnnnnnnnnnnnnnnnnnnnnnnnnnnnnnnnnnnnnnnnnnnnnnnnnnnnnnnnnnnnnnnnnnnnnnnnnnnnnnnnnnnnnnnnnnnnnnnnnnnnnnnnnnnnnnnnnnnnnnnnnnnnnnnnnnnnnnnnnnnnnnnnnnnnnnnnnnnnnnnnnnnnnnnnnnnnnnnnnnnnnnnnnnnnnnnnnnnnnnnnnnnnnnnnnnnnnnnnnnnnnnnnnnnnnnnnnnnnnnnnnnnnnnnnnnnnnnnnnnnnnnnnnnnnnnnnnnnnnnnnnnnnnnnnnnnnnnnnnnnnnnnnnnnnnnnnnnnnnnnnnnnnnnnnnnnnnnnnnnnnnnnnnnnnnnnnnnnnnnnnnnnnnnnnnnnnnnnnnnnnnnnnnnnnnnnnnnnnnnnnnnnnnnnnnnnnnnnnnnnnnnnnnnnnnnnnnnnnnnnnnnnnnnnnnnnnnnnnnnnnnnnnnnnnnnnnnnnnnnnnnnnnnnnnnnnnnnnnnnnnnnnnnnnnnnnnnnnnnnnnnnnnnnnnnnnnnnnnnnnnnnnnnnnnnnnnnnnnnnnnnnnnnnnnnnnnnnnnnnnnnnnnnnnnnnnnnnnnnnnnnnnnnnnnnnnnnnnnnnnnnnnnnnnnnnnnnnnnnnnnnnnnnnnnnnnnnnnnnnnnnnnnnnnnnnnnnnnnnnnnnnnnnnnnnnnnnnnnnnnnnnnnnnnnnnnnnnnnnnnnnnnnnnnnnnnnnnnnnnnnnnnnnnnnnnnnnnnnnnnnnnnnnnnnnnnnnnnnnnnnnnnnnnnnnnnnnnnnnnnnnnnnnnnnnnnnnnnnnnnnnnnnnnnnnnnnnnnnnnnnnnnnnnnnnnnnnnnnnnnnnnnnnnnnnnnnnnnnnnnnnnnnnnnnnnnnnnnnnnnnnnnnnnnnnnnnnnnnnnnnnnnnnnnnnnnnnnnnnnnnnnnnnnnnnnnnnnnnnnnnnnnnnnnnnnnnnnnnnnnnnnnnnnnnnnnnnnnnnnnnnnnnnnnnnnnnnnnnnnnnnnnnnnnnnnnnnnnnnnnnnnnnnnnnnnnnnnnnnnnnnnnnnnnnnnnnnnnnnnnnnnnnnnnnnnnnnnnnnnnnnnnnnnnnnnnnnnnnnnnnnnnnnnnnnnnnnnnnnnnnnnnnnnnnnnnnnnnnnnnnnnnnnnnnnnnnnnnnnnnnnnnnnnnnnnnnnnnnnnnnnnnnnnnnnnnnnnnnnnnnnnnnnnnnnnnnnnnnnnnnnnnnnnnnnnnnnnnnnnnnnnnnnnnnnnnnnnnnnnnnnnnnnnnnnnnnnnnnnnnnnnnnnnnnnnnnnnnnnnnnnnnnnnnnnnnnnnnnnnnnnnnnnnnnnnnnnnnnnnnnnnnnnnnnnnnnnnnnnnnnnnnnnnnnnnnnnnnnnnnnnnnnnnnnnnnnnnnnnnnnnnnnnnnnnnnnnnnnnnnnnnnnnnnnnnnnnnnnnnnnnnnnnnnnnnnnnnnnnnnnnnnnnnnnnnnnnnnnnnnnnnnnnnnnnnnnnnnnnnnnnnnnnnnnnnnnnnnnnnnnnnnnnnnnnnnnnnnnnnnnnnnnnnnnnnnnnnnnnnnnnnnnnnnnnnnnnnnnnnnnnnnnnnnnnnnnnnnnnnnnnnnnnnnnnnnnnnnnnnnnnnnnnnnnnnnnnnnnnnnnnnnnnnnnnnnnnnnnnnnnnnnnnnnnnnnnnnnnnnnnnnnnnnnnnnnnnnnnnnnnnnnnnnnnnnnnnnnnnnnnnnnnnnnnnnnnnnnnnnnnnnnnnnnnnnnnnnnnnnnnnnnnnnnnnnnnnnnnnnnnnnnnnnnnnnnnnnnnnnnnnnnnnnnnnnnnnnnnnnnnnnnnnnnnnnnnnnnnnnnnnnnnnnnnnnnnnnnnnnnnnnnnnnnnnnnnnnnnnnnnnnnnnnnnnnnnnnnnnnnnnnnnnnnnnnnnnnnnnnnnnnnnnnnnnnnnnnnnnnnnnnnnnnnnnnnnnnnnnnnnnnnnnnnnnnnnnnnnnnnnnnnnnnnnnnnnnnnnnnnnnnnnnnnnnnnnnnnnnnnnnnnnnnnnnnnnnnnnnnnnnnnnnnnnnnnnnnnnnnnnnnnnnnnnnnnnnnnnnnnnnnnnnnnnnnnnnnnnnnnnnnnnnnnnnnnnnnnnnnnnnnnnnnnnnnnnnnnnnnnnnnnnnnnnnnnnnnnnnnnnnnnnnnnnnnnnnnnnnnnnnnnnnnnnnnnnnnnnnnnnnnnnnnnnnnnnnnnnnnnnnnnnnnnnnnnnnnnnnnnnnnnnnnnnnnnnnnnnnnnnnnnnnnnnnnnnnnnnnnnnnnnnnnnnnnnnnnnnnnnnnnnnnnnnnnnnnnnnnnnnnnnnnnnnnnnnnnnnnnnnnnnnnnnnnnnnnnnnnnnnnnnnnnnnnnnnnnnnnnnnnnnnnnnnnnnnnnnnnnnnnnnnnnnnnnnnnnnnnnnnnnnnnnnnnnnnnnnnnnnnnnnnnnnnnnnnnnnnnnnnnnnnnnnnnnnnnnnnnnnnnnnnnnnnnnnnnnnnnnnnnnnnnnnnnnnnnnnnnnnnnnnnnnnnnnnnnnnnnnnnnnnnnnnnnnnnnnnnnnnnnnnnnnnnnnnnnnnnnnnnnnnnnnnnnnnnnnnnnnnnnnnnnnnnnnnnnnnnnnnnnnnnnnnnnnnnnnnnnnnnnnnnnnnnnnnnnnnnnnnnnnnnnnnnnnnnnnnnnnnnnnnnnnnnnnnnnnnnnnnnnnnnnnnnnnnnnnnnnnnnnnnnnnnnnnnnnnnnnnnnnnnnnnnnnnnnnnnnnnnnnnnnnnnnnnnnnnnnnnnnnnnnnnnnnnnnnnnnnnnnnnnnnnnnnnnnnnnnnnnnnnnnnnnnnnnnnnnnnnnnnnnnnnnnnnnnnnnnnnnnnnnnnnnnnnnnnnnnnnnnnnnnnnnnnnnnnnnnnnnnnnnnnnnnnnnnnnnnnnnnnnnnnnnnnnnnnnnnnnnnnnnnnnnnnnnnnnnnnnnnnnnnnnnnnnnnnnnnnnnnnnnnnnnnnnnnnnnnnnnnnnnnnnnnnnnnnnnnnnnnnnnnnnnnnnnnnnnnnnnnnnnnnnnnnnnnnnnnnnnnnnnnnnnnnnnnnnnnnnnnnnnnnnnnnnnnnnnnnnnnnnnnnnnnnnnnnnnnnnnnnnnnnnnnnnnnnnnnnnnnnnnnnnnnnnnnnnnnnnnnnnnnnnnnnnnnnnnnnnnnnnnnnnnnnnnnnnnnnnnnnnnnnnnnnnnnnnnnnnnnnnnnnnnnnnnnnnnnnnnnnnnnnnnnnnnnnnnnnnnnnnnnnnnnnnnnnnnnnnnnnnnnnnnnnnnnnnnnnnnnnnnnnnnnnnnnnnnnnnnnnnnnnnnnnnnnnnnnnnnnnnnnnnnnnnnnnnnnnnnnnnnnnnnnnnnnnnnnnnnnnnnnnnnnnnnnnnnnnnnnnnnnnnnnnnnnnnnnnnnnnnnnnnnnnnnnnnnnnnnnnnnnnnnnnnnnnnnnnnnnnnnnnnnnnnnnnnnnnnnnnnnnnnnnnnnnnnnnnnnnnnnnnnnnnnnnnnnnnnnnnnnnnnnnnnnnnnnnnnnnnnnnnnnnnnnnnnnnnnnnnnnnnnnnnnnnnnnnnnnnnnnnnnnnnnnnnnnnnnnnnnnnnnnnnnnnnnnnnnnnnnnnnnnnnnnnnnnnnnnnnnnnnnnnnnnnnnnnnnnnnnnnnnnnnnnnnnnnnnnnnnnnnnnnnnnnnnnnnnnnnnnnnnnnnnnnnnnnnnnnnnnnnnnnnnnnnnnnnnnnnnnnnnnnnnnnnnnnnnnnnnnnnnnnnnnnnnnnnnnnnnnnnnnnnnnnnnnnnnnnnnnnnnnnnnnnnnnnnnnnnnnnnnnnnnnnnnnnnnnnnnnnnnnnnnnnnnnnnnnnnnnnnnnnnnnnnnnnnnnnnnnnnnnnnnnnnnnnnnnnnnnnnnnnnnnnnnnnnnnnnnnnnnnnnnnnnnnnnnnnnnnnnnnnnnnnnnnnnnnnnnnnnnnnnnnnnnnnnnnnnnnnnnnnnnnnnnnnnnnnnnnnnnnnnnnnnnnnnnnnnnnnnnnnnnnnnnnnnnnnnnnnnnnnnnnnnnnnnnnnnnnnnnnnnnnnnnnnnnnnnnnnnnnnnnnnnnnnnnnnnnnnnnnnnnnnnnnnnnnnnnnnnnnnnnnnnnnnnnnnnnnnnnnnnnnnnnnnnnnnnnnnnnnnnnnnnnnnnnnnnnnnnnnnnnnnnnnnnnnnnnnnnnnnnnnnnnnnnnnnnnnnnnnnnnnnnnnnnnnnnnnnnnnnnnnnnnnnnnnnnnnnnnnnnnnnnnnnnnnnnnnnnnnnnnnnnnnnnnnnnnnnnnnnnnnnnnnnnnnnnnnnnnnnnnnnnnnnnnnnnnnnnnnnnnnnnnnnnnnnnnnnnnnnnnnnnnnnnnnnnnnnnnnnnnnnnnnnnnnnnnnnnnnnnnnnnnnnnnnnnnnnnnnnnnnnnnnnnnnnnnnnnnnnnnnnnnnnnnnnnnnnnnnnnnnnnnnnnnnnnnnnnnnnnnnnnnnnnnnnnnnnnnnnnnnnnnnnnnnnnnnnnnnnnnnnnnnnnnnnnnnnnnnnnnnnnnnnnnnnnnnnnnnnnnnnnnnnnnnnnnnnnnnnnnnnnnnnnnnnnnnnnnnnnnnnnnnnnnnnnnnnnnnnnnnnnnnnnnnnnnnnnnnnnnnnnnnnnnnnnnnnnnnnnnnnnnnnnnnnnnnnnnnnnnnnnnnnnnnnnnnnnnnnnnnnnnnnnnnnnnnnnnnnnnnnnnnnnnnnnnnnnnnnnnnnnnnnnnnnnnnnnnnnnnnnnnnnnnnnnnnnnnnnnnnnnnnnnnnnnnnnnnnnnnnnnnnnnnnnnnnnnnnnnnnnnnnnnnnnnnnnnnnnnnnnnnnnnnnnnnnnnnnnnnnnnnnnnnnnnnnnnnnnnnnnnnnnnnnnnnnnnnnnnnnnnnnnnnnnnnnnnnnnnnnnnnnnnnnnnnnnnnnnnnnnnnnnnnnnnnnnnnnnnnnnnnnnnnnnnnnnnnnnnnnnnnnnnnnnnnnnnnnnnnnnnnnnnnnnnnnnnnnnnnnnnnnnnnnnnnnnnnnnnnnnnnnnnnnnnnnnnnnnnnnnnnnnnnnnnnnnnnnnnnnnnnnnnnnnnnnnnnnnnnnnnnnnnnnnnnnnnnnnnnnnnnnnnnnnnnnnnnnnnnnnnnnnnnnnnnnnnnnnnnnnnnnnnnnnnnnnnnnnnnnnnnnnnnnnnnnnnnnnnnnnnnnnnnnnnnnnnnnnnnnnnnnnnnnnnnnnnnnnnnnnnnnnnnnnnnnnnnnnnnnnnnnnnnnnnnnnnnnnnnnnnnnnnnnnnnnnnnnnnnnnnnnnnnnnnnnnnnnnnnnnnnnnnnnnnnnnnnnnnnnnnnnnnnnnnnnnnnnnnnnnnnnnnnnnnnnnnnnnnnnnnnnnnnnnnnnnnnnnnnnnnnnnnnnnnnnnnnnnnnnnnnnnnnnnnnnnnnnnnnnnnnnnnnnnnnnnnnnnnnnnnnnnnnnnnnnnnnnnnnnnnnnnnnnnnnnnnnnnnnnnnnnnnnnnnnnnnnnnnnnnnnnnnnnnnnnnnnnnnnnnnnnnnnnnnnnnnnnnnnnnnnnnnnnnnnnnnnnnnnnnnnnnnnnnnnnnnnnnnnnnnnnnnnnnnnnnnnnnnnnnnnnnnnnnnnnnnnnnnnnnnnnnnnnnnnnnnnnnnnnnnnnnnnnnnnnnnnnnnnnnnnnnnnnnnnnnnnnnnnnnnnnnnnnnnnnnnnnnnnnnnnnnnnnnnnnnnnnnnnnnnnnnnnnnnnnnnnnnnnnnnnnnnnnnnnnnnnnnnnnnnnnnnnnnnnnnnnnnnnnnnnnnnnnnnnnnnnnnnnnnnnnnnnnnnnnnnnnnnnnnnnnnnnnnnnnnnnnnnnnnnnnnnnnnnnnnnnnnnnnnnnnnnnnnnnnnnnnnnnnnnnnnnnnnnnnnnnnnnnnnnnnnnnnnnnnnnnnnnnnnnnnnnnnnnnnnnnnnnnnnnnnnnnnnnnnnnnnnnnnnnnnnnnnnnnnnnnnnnnnnnnnnnnnnnnnnnnnnnnnnnnnnnnnnnnnnnnnnnnnnnnnnnnnnnnnnnnnnnnnnnnnnnnnnnnnnnnnnnnnnnnnnnnnnnnnnnnnnnnnnnnnnnnnnnnnnnnnnnnnnnnnnnnnnnnnnnnnnnnnnnnnnnnnnnnnnnnnnnnnnnnnnnnnnnnnnnnnnnnnnnnnnnnnnnnnnnnnnnnnnnnnnnnnnnnnnnnnnnnnnnnnnnnnnnnnnnnnnnnnnnnnnnnnnnnnnnnnnnnnnnnnnnnnnnnnnnnnnnnnnnnnnnnnnnnnnnnnnnnnnnnnnnnnnnnnnnnnnnnnnnnnnnnnnnnnnnnnnnnnnnnnnnnnnnnnnnnnnnnnnnnnnnnnnnnnnnnnnnnnnnnnnnnnnnnnnnnnnnnnnnnnnnnnnnnnnnnnnnnnnnnnnnnnnnnnnnnnnnnnnnnnnnnnnnnnnnnnnnnnnnnnnnnnnnnnnnnnnnnnnnnnnnnnnnnnnnnnnnnnnnnnnnnnnnnnnnnnnnnnnnnnnnnnnnnnnnnnnnnnnnnnnnnnnnnnnnnnnnnnnnnnnnnnnnnnnnnnnnnnnnnnnnnnnnnnnnnnnnnnnnnnnnnnnnnnnnnnnnnnnnnnnnnnnnnnnnnnnnnnnnnnnnnnnnnnnnnnnnnnnnnnnnnnnnnnnnnnnnnnnnnnnnnnnnnnnnnnnnnnnnnnnnnnnnnnnnnnnnnnnnnnnnnnnnnnnnnnnnnnnnnnnnnnnnnnnnnnnnnnnnnnnnnnnnnnnnnnnnnnnnnnnnnnnnnnnnnnnnnnnnnnnnnnnnnnnnnnnnnnnnnnnnnnnnnnnnnnnnnnnnnnnnnnnnnnnnnnnnnnnnnnnnnnnnnnnnnnnnnnnnnnnnnnnnnnnnnnnnnnnnnnnnnnnnnnnnnnnnnnnnnnnnnnnnnnnnnnnnnnnnnnnnnnnnnnnnnnnnnnnnnnnnnnnnnnnnnnnnnnnnnnnnnnnnnnnnnnnnnnnnnnnnnnnnnnnnnnnnnnnnnnnnnnnnnnnnnnnnnnnnnnnnnnnnnnnnnnnnnnnnnnnnnnnnnnnnnnnnnnnnnnnnnnnnnnnnnnnnnnnnnnnnnnnnnnnnnnnnnnnnnnnnnnnnnnnnnnnnnnnnnnnnnnnnnnnnnnnnnnnnnnnnnnnnnnnnnnnnnnnnnnnnnnnnnnnnnnnnnnnnnnnnnnnnnnnnnnnnnnnnnnnnnnnnnnnnnnnnnnnnnnnnnnnnnnnnnnnnnnnnnnnnnnnnnnnnnnnnnnnnnnnnnnnnnnnnnnnnnnnnnnnnnnnnnnnnnnnnnnnnnnnnnnnnnnnnnnnnnnnnnnnnnnnnnnnnnnnnnnnnnnnnnnnnnnnnnnnnnnnnnnnnnnnnnnnnnnnnnnnnnnnnnnnnnnnnnnnnnnnnnnnnnnnnnnnnnnnnnnnnnnnnnnnnnnnnnnnnnnnnnnnnnnnnnnnnnnnnnnnnnnnnnnnnnnnnnnnnnnnnnnnnnnnnnnnnnnnnnnnnnnnnnnnnnnnnnnnnnnnnnnnnnnnnnnnnnnnnnnnnnnnnnnnnnnnnnnnnnnnnnnnnnnnnnnnnnnnnnnnnnnnnnnnnnnnnnnnnnnnnnnnnnnnnnnnnnnnnnnnnnnnnnnnnnnnnnnnnnnnnnnnnnnnnnnnnnnnnnnnnnnnnnnnnnnnnnnnnnnnnnnnnnnnnnnnnnnnnnnnnnnnnnnnnnnnnnnnnnnnnnnnnnnnnnnnnnnnnnnnnnnnnnnnnnnnnnnnnnnnnnnnnnnnnnnnnnnnnnnnnnnnnnnnnnnnnnnnnnnnnnnnnnnnnnnnnnnnnnnnnnnnnnnnnnnnnnnnnnnnnnnnnnnnnnnnnnnnnnnnnnnnnnnnnnnnnnnnnnnnnnnnnnnnnnnnnnnnnnnnnnnnnnnnnnnnnnnnnnnnnnnnnnnnnnnnnnnnnnnnnnnnnnnnnnnnnnnnnnnnnnnnnnnnnnnnnnnnnnnnnnnnnnnnnnnnnnnnnnnnnnnnnnnnnnnnnnnnnnnnnnnnnnnnnnnnnnnnnnnnnnnnnnnnnnnnnnnnnnnnnnnnnnnnnnnnnnnnnnnnnnnnnnnnnnnnnnnnnnnnnnnnnnnnnnnnnnnnnnnnnnnnnnnnnnnnnnnnnnnnnnnnnnnnnnnnnnnnnnnnnnnnnnnnnnnnnnnnnnnnnnnnnnnnnnnnnnnnnnnnnnnnnnnnnnnnnnnnnnnnnnnnnnnnnnnnnnnnnnnnnnnnnnnnnnnnnnnnnnnnnnnnnnnnnnnnnnnnnnnnnnnnnnnnnnnnnnnnnnnnnnnnnnnnnnnnnnnnnnnnnnnnnnnnnnnnnnnnnnnnnnnnnnnnnnnnnnnnnnnnnnnnnnnnnnnnnnnnnnnnnnnnnnnnnnnnnnnnnnnnnnnnnnnnnnnnnnnnnnnnnnnnnnnnnnnnnnnnnnnnnnnnnnnnnnnnnnnnnnnnnnnnnnnnnnnnnnnnnnnnnnnnnnnnnnnnnnnnnnnnnnnnnnnnnnnnnnnnnnnnnnnnnnnnnnnnnnnnnnnnnnnnnnnnnnnnnnnnnnnnnnnnnnnnnnnnnnnnnnnnnnnnnnnnnnnnnnnnnnnnnnnnnnnnnnnnnnnnnnnnnnnnnnnnnnnnnnnnnnnnnnnnnnnnnnnnnnnnnnnnnnnnnnnnnnnnnnnnnnnnnnnnnnnnnnnnnnnnnnnnnnnnnnnnnnnnnnnnnnnnnnnnnnnnnnnnnnnnnnnnnnnnnnnnnnnnnnnnnnnnnnnnnnnnnnnnnnnnnnnnnnnnnnnnnnnnnnnnnnnnnnnnnnnnnnnnnnnnnnnnnnnnnnnnnnnnnnnnnnnnnnnnnnnnnnnnnnnnnnnnnnnnnnnnnnnnnnnnnnnnnnnnnnnnnnnnnnnnnnnnnnnnnnnnnnnnnnnnnnnnnnnnnnnnnnnnnnnnnnnnnnnnnnnnnnnnnnnnnnnnnnnnnnnnnnnnnnnnnnnnnnnnnnnnnnnnnnnnnnnnnnnnnnnnnnnnnnnnnnnnnnnnnnnnnnnnnnnnnnnnnnnnnnnnnnnnnnnnnnnnnnnnnnnnnnnnnnnnnnnnnnnnnnnnnnnnnnnnnnnnnnnnnnnnnnnnnnnnnnnnnnnnnnnnnnnnnnnnnnnnnnnnnnnnnnnnnnnnnnnnnnnnnnnnnnnnnnnnnnnnnnnnnnnnnnnnnnnnnnnnnnnnnnnnnnnnnnnnnnnnnnnnnnnnnnnnnnnnnnnnnnnnnnnnnnnnnnnnnnnnnnnnnnnnnnnnnnnnnnnnnnnnnnnnnnnnnnnnnnnnnnnnnnnnnnnnnnnnnnnnnnnnnnnnnnnnnnnnnnnnnnnnnnnnnnnnnnnnnnnnnnnnnnnnnnnnnnnnnnnnnnnnnnnnnnnnnnnnnnnnnnnnnnnnnnnnnnnnnnnnnnnnnnnnnnnnnnnnnnnnnnnnnnnnnnnnnnnnnnnnnnnnnnnnnnnnnnnnnnnnnnnnnnnnnnnnnnnnnnnnnnnnnnnnnnnnnnnnnnnnnnnnnnnnnnnnnnnnnnnnnnnnnnnnnnnnnnnnnnnnnnnnnnnnnnnnnnnnnnnnnnnnnnnnnnnnnnnnnnnnnnnnnnnnnnnnnnnnnnnnnnnnnnnnnnnnnnnnnnnnnnnnnnnnnnnnnnnnnnnnnnnnnnnnnnnnnnnnnnnnnnnnnnnnnnnnnnnnnnnnnnnnnnnnnnnnnnnnnnnnnnnnnnnnnnnnnnnnnnnnnnnnnnnnnnnnnnnnnnnnnnnnnnnnnnnnnnnnnnnnnnnnnnnnnnnnnnnnnnnnnnnnnnnnnnnnnnnnnnnnnnnnnnnnnnnnnnnnnnnnnnnnnnnnnnnnnnnnnnnnnnnnnnnnnnnnnnnnnnnnnnnnnnnnnnnnnnnnnnnnnnnnnnnnnnnnnnnnnnnnnnnnnnnnnnnnnnnnnnnnnnnnnnnnnnnnnnnnnnnnnnnnnnnnnnnnnnnnnnnnnnnnnnnnnnnnnnnnnnnnnnnnnnnnnnnnnnnnnnnnnnnnnnnnnnnnnnnnnnnnnnnnnnnnnnnnnnnnnnnnnnnnnnnnnnnnnnnnnnnnnnnnnnnnnnnnnnnnnnnnnnnnnnnnnnnnnnnnnnnnnnnnnnnnnnnnnnnnnnnnnnnnnnnnnnnnnnnnnnnnnnnnnnnnnnnnnnnnnnnnnnnnnnnnnnnnnnnnnnnnnnnnnnnnnnnnnnnnnnnnnnnnnnnnnnnnnnnnnnnnnnnnnnnnnnnnnnnnnnnnnnnnnnnnnnnnnnnnnnnnnnnnnnnnnnnnnnnnnnnnnnnnnnnnnnnnnnnnnnnnnnnnnnnnnnnnnnnnnnnnnnnnnnnnnnnnnnnnnnnnnnnnnnnnnnnnnnnnnnnnnnnnnnnnnnnnnnnnnnnnnnnnnnnnnnnnnnnnnnnnnnnnnnnnnnnnnnnnnnnnnnnnnnnnnnnnnnnnnnnnnnnnnnnnnnnnnnnnnnnnnnnnnnnnnnnnnnnnnnnnnnnnnnnnnnnnnnnnnnnnnnnnnnnnnnnnnnnnnnnnnnnnnnnnnnnnnnnnnnnnnnnnnnnnnnnnnnnnnnnnnnnnnnnnnnnnnnnnnnnnnnnnnnnnnnnnnnnnnnnnnnnnnnnnnnnnnnnnnnnnnnnnnnnnnnnnnnnnnnnnnnnnnnnnnnnnnnnnnnnnnnnnnnnnnnnnnnnnnnnnnnnnnnnnnnnnnnnnnnnnnnnnnnnnnnnnnnnnnnnnnnnnnnnnnnnnnnnnnnnnnnnnnnnnnnnnnnnnnnnnnnnnnnnnnnnnnnnnnnnnnnnnnnnnnnnnnnnnnnnnnnnnnnnnnnnnnnnnnnnnnnnnnnnnnnnnnnnnnnnnnnnnnnnnnnnnnnnnnnnnnnnnnnnnnnnnnnnnnnnnnnnnnnnnnnnnnnnnnnnnnnnnnnnnnnnnnnnnnnnnnnnnnnnnnnnnnnnnnnnnnnnnnnnnnnnnnnnnnnnnnnnnnnnnnnnnnnnnnnnnnnnnnnnnnnnnnnnnnnnnnnnnnnnnnnnnnnnnnnnnnnnnnnnnnnnnnnnnnnnnnnnnnnnnnnnnnnnnnnnnnnnnnnnnnnnnnnnnnnnnnnnnnnnnnnnnnnnnnnnnnnnnnnnnnnnnnnnnnnnnnnnnnnnnnnnnnnnnnnnnnnnnnnnnnnnnnnnnnnnnnnnnnnnnnnnnnnnnnnnnnnnnnnnnnnnnnnnnnnnnnnnnnnnnnnnnnnnnnnnnnnnnnnnnnnnnnnnnnnnnnnnnnnnnnnnnnnnnnnnnnnnnnnnnnnnnnnnnnnnnnnnnnnnnnnnnnnnnnnnnnnnnnnnnnnnnnnnnnnnnnnnnnnnnnnnnnnnnnnnnnnnnnnnnnnnnnnnnnnnnnnnnnnnnnnnnnnnnnnnnnnnnnnnnnnnnnnnnnnnnnnnnnnnnnnnnnnnnnnnnnnnnnnnnnnnnnnnnnnnnnnnnnnnnnnnnnnnnnnnnnnnnnnnnnnnnnnnnnnnnnnnnnnnnnnnnnnnnnnnnnnnnnnnnnnnnnnnnnnnnnnnnnnnnnnnnnnnnnnnnnnnnnnnnnnnnnnnnnnnnnnnnnnnnnnnnnnnnnnnnnnnnnnnnnnnnnnnnnnnnnnnnnnnnnnnnnnnnnnnnnnnnnnnnnnnnnnnnnnnnnnnnnnnnnnnnnnnnnnnnnnnnnnnnnnnnnnnnnnnnnnnnnnnnnnnnnnnnnnnnnnnnnnnnnnnnnnnnnnnnnnnnnnnnnnnnnnnnnnnnnnnnnnnnnnnnnnnnnnnnnnnnnnnnnnnnnnnnnnnnnnnnnnnnnnnnnnnnnnnnnnnnnnnnnnnnnnnnnnnnnnnnnnnnnnnnnnnnnnnnnnnnnnnnnnnnnnnnnnnnnnnnnnnnnnnnnnnnnnnnnnnnnnnnnnnnnnnnnnnnnnnnnnnnnnnnnnnnnnnnnnnnnnnnnnnnnnnnnnnnnnnnnnnnnnnnnnnnnnnnnnnnnnnnnnnnnnnnnnnnnnnnnnnnnnnnnnnnnnnnnnnnnnnnnnnnnnnnnnnnnnnnnnnnnnnnnnnnnnnnnnnnnnnnnnnnnnnnnnnnnnnnnnnnnnnnnnnnnnnnnnnnnnnnnnnnnnnnnnnnnnnnnnnnnnnnnnnnnnnnnnnnnnnnnnnnnnnnnnnnnnnnnnnnnnnnnnnnnnnnnnnnnnnnnnnnnnnnnnnnnnnnnnnnnnnnnnnnnnnnnnnnnnnnnnnnnnnnnnnnnnnnnnnnnnnnnnnnnnnnnnnnnnnnnnnnnnnnnnnnnnnnnnnnnnnnnnnnnnnnnnnnnnnnnnnnnnnnnnnnnnnnnnnnnnnnnnnnnnnnnnnnnnnnnnnnnnnnnnnnnnnnnnnnnnnnnnnnnnnnnnnnnnnnnnnnnnnnnnnnnnnnnnnnnnnnnnnnnnnnnnnnnnnnnnnnnnnnnnnnnnnnnnnnnnnnnnnnnnnnnnnnnnnnnnnnnnnnnnnnnnnnnnnnnnnnnnnnnnnnnnnnnnnnnnnnnnnnnnnnnnnnnnnnnnnnnnnnnnnnnnnnnnnnnnnnnnnnnnnnnnnnnnnnnnnnnnnnnnnnnnnnnnnnnnnnnnnnnnnnnnnnnnnnnnnnnnnnnnnnnnnnnnnnnnnnnnnnnnnnnnnnnnnnnnnnnnnnnnnnnnnnnnnnnnnnnnnnnnnnnnnnnnnnnnnnnnnnnnnnnnnnnnnnnnnnnnnnnnnnnnnnnnnnnnnnnnnnnnnnnnnnnnnnnnnnnnnnnnnnnnnnnnnnnnnnnnnnnnnnnnnnnnnnnnnnnnnnnnnnnnnnnnnnnnnnnnnnnnnnnnnnnnnnnnnnnnnnnnnnnnnnnnnnnnnnnnnnnnnnnnnnnnnnnnnnnnnnnnnnnnnnnnnnnnnnnnnnnnnnnnnnnnnnnnnnnnnnnnnnnnnnnnnnnnnnnnnnnnnnnnnnnnnnnnnnnnnnnnnnnnnnnnnnnnnnnnnnnnnnnnnnnnnnnnnnnnnnnnnnnnnnnnnnnnnnnnnnnnnnnnnnnnnnnnnnnnnnnnnnnnnnnnnnnnnnnnnnnnnnnnnnnnnnnnnnnnnnnnnnnnnnnnnnnnnnnnnnnnnnnnnnnnnnnnnnnnnnnnnnnnnnnnnnnnnnnnnnnnnnnnnnnnnnnnnnnnnnnnnnnnnnnnnnnnnnnnnnnnnnnnnnnnnnnnnnnnnnnnnnnnnnnnnnnnnnnnnnnnnnnnnnnnnnnnnnnnnnnnnnnnnnnnnnnnnnnnnnnnnnnnnnnnnnnnnnnnnnnnnnnnnnnnnnnnnnnnnnnnnnnnnnnnnnnnnnnnnnnnnnnnnnnnnnnnnnnnnnnnnnnnnnnnnnnnnnnnnnnnnnnnnnnnnnnnnnnnnnnnnnnnnnnnnnnnnnnnnnnnnnnnnnnnnnnnnnnnnnnnnnnnnnnnnnnnnnnnnnnnnnnnnnnnnnnnnnnnnnnnnnnnnnnnnnnnnnnnnnnnnnnnnnnnnnnnnnnnnnnnnnnnnnnnnnnnnnnnnnnnnnnnnnnnnnnnnnnnnnnnnnnnnnnnnnnnnnnnnnnnnnnnnnnnnnnnnnnnnnnnnnnnnnnnnnnnnnnnnnnnnnnnnnnnnnnnnnnnnnnnnnnnnnnnnnnnnnnnnnnnnnnnnnnnnnnnnnnnnnnnnnnnnnnnnnnnnnnnnnnnnnnnnnnnnnnnnnnnnnnnnnnnnnnnnnnnnnnnnnnnnnnnnnnnnnnnnnnnnnnnnnnnnnnnnnnnnnnnnnnnnnnnnnnnnnnnnnnnnnnnnnnnnnnnnnnnnnnnnnnnnnnnnnnnnnnnnnnnnnnnnnnnnnnnnnnnnnnnnnnnnnnnnnnnnnnnnnnnnnnnnnnnnnnnnnnnnnnnnnnnnnnnnnnnnnnnnnnnnnnnnnnnnnnnnnnnnnnnnnnnnnnnnnnnnnnnnnnnnnnnnnnnnnnnnnnnnnnnnnnnnnnnnnnnnnnnnnnnnnnnnnnnnnnnnnnnnnnnnnnnnnnnnnnnnnnnnnnnnnnnnnnnnnnnnnnnnnnnnnnnnnnnnnnnnnnnnnnnnnnnnnnnnnnnnnnnnnnnnnnnnnnnnnnnnnnnnnnnnnnnnnnnnnnnnnnnnnnnnnnnnnnnnnnnnnnnnnnnnnnnnnnnnnnnnnnnnnnnnnnnnnnnnnnnnnnnnnnnnnnnnnnnnnnnnnnnnnnnnnnnnnnnnnnnnnnnnnnnnnnnnnnnnnnnnnnnnnnnnnnnnnnnnnnnnnnnnnnnnnnnnnnnnnnnnnnnnnnnnnnnnnnnnnnnnnnnnnnnnnnnnnnnnnnnnnnnnnnnnnnnnnnnnnnnnnnnnnnnnnnnnnnnnnnnnnnnnnnnnnnnnnnnnnnnnnnnnnnnnnnnnnnnnnnnnnnnnnnnnnnnnnnnnnnnnnnnnnnnnnnnnnnnnnnnnnnnnnnnnnnnnnnnnnnnnnnnnnnnnnnnnnnnnnnnnnnnnnnnnnnnnnnnnnnnnnnnnnnnnnnnnnnnnnnnnnnnnnnnnnnnnnnnnnnnnnnnnnnnnnnnnnnnnnnnnnnnnnnnnnnnnnnnnnnnnnnnnnnnnnnnnnnnnnnnnnnnnnnnnnnnnnnnnnnnnnnnnnnnnnnnnnnnnnnnnnnnnnnnnnnnnnnnnnnnnnnnnnnnnnnnnnnnnnnnnnnnnnnnnnnnnnnnnnnnnnnnnnnnnnnnnnnnnnnnnnnnnnnnnnnnnnnnnnnnnnnnnnnnnnnnnnnnnnnnnnnnnnnnnnnnnnnnnnnnnnnnnnnnnnnnnnnnnnnnnnnnnnnnnnnnnnnnnnnnnnnnnnnnnnnnnnnnnnnnnnnnnnnnnnnnnnnnnnnnnnnnnnnnnnnnnnnnnnnnnnnnnnnnnnnnnnnnnnnnnnnnnnnnnnnnnnnnnnnnnnnnnnnnnnnnnnnnnnnnnnnnnnnnnnnnnnnnnnnnnnnnnnnnnnnnnnnnnnnnnnnnnnnnnnnnnnnnnnnnnnnnnnnnnnnnnnnnnnnnnnnnnnnnnnnnnnnnnnnnnnnnnnnnnnnnnnnnnnnnnnnnnnnnnnnnnnnnnnnnnnnnnnnnnnnnnnnnnnnnnnnnnnnnnnnnnnnnnnnnnnnnnnnnnnnnnnnnnnnnnnnnnnnnnnnnnnnnnnnnnnnnnnnnnnnnnnnnnnnnnnnnnnnnnnnnnnnnnnnnnnnnnnnnnnnnnnnnnnnnnnnnnnnnnnnnnnnnnnnnnnnnnnnnnnnnnnnnnnnnnnnnnnnnnnnnnnnnnnnnnnnnnnnnnnnnnnnnnnnnnnnnnnnnnnnnnnnnnnnnnnnnnnnnnnnnnnnnnnnnnnnnnnnnnnnnnnnnnnnnnnnnnnnnnnnnnnnnnnnnnnnnnnnnnnnnnnnnnnnnnnnnnnnnnnnnnnnnnnnnnnnnnnnnnnnnnnnnnnnnnnnnnnnnnnnnnnnnnnnnnnnnnnnnnnnnnnnnnnnnnnnnnnnnnnnnnnnnnnnnnnnnnnnnnnnnnnnnnnnnnnnnnnnnnnnnnnnnnnnnnnnnnnnnnnnnnnnnnnnnnnnnnnnnnnnnnnnnnnnnnnnnnnnnnnnnnnnnnnnnnnnnnnnnnnnnnnnnnnnnnnnnnnnnnnnnnnnnnnnnnnnnnnnnnnnnnnnnnnnnnnnnnnnnnnnnnnnnnnnnnnnnnnnnnnnnnnnnnnnnnnnnnnnnnnnnnnnnnnnnnnnnnnnnnnnnnnnnnnnnnnnnnnnnnnnnnnnnnnnnnnnnnnnnnnnnnnnnnnnnnnnnnnnnnnnnnnnnnnnnnnnnnnnnnnnnnnnnnnnnnnnnnnnnnnnnnnnnnnnnnnnnnnnnnnnnnnnnnnnnnnnnnnnnnnnnnnnnnnnnnnnnnnnnnnnnnnnnnnnnnnnnnnnnnnnnnnnnnnnnnnnnnnnnnnnnnnnnnnnnnnnnnnnnnnnnnnnnnnnnnnnnnnnnnnnnnnnnnnnnnnnnnnnnnnnnnnnnnnnnnnnnnnnnnnnnnnnnnnnnnnnnnnnnnnnnnnnnnnnnnnnnnnnnnnnnnnnnnnnnnnnnnnnnnnnnnnnnnnnnnnnnnnnnnnnnnnnnnnnnnnnnnnnnnnnnnnnnnnnnnnnnnnnnnnnnnnnnnnnnnnnnnnnnnnnnnnnnnnnnnnnnnnnnnnnnnnnnnnnnnnnnnnnnnnnnnnnnnnnnnnnnnnnnnnnnnnnnnnnnnnnnnnnnnnnnnnnnnnnnnnnnnnnnnnnnnnnnnnnnnnnnnnnnnnnnnnnnnnnnnnnnnnnnnnnnnnnnnnnnnnnnnnnnnnnnnnnnnnnnnnnnnnnnnnnnnnnnnnnnnnnnnnnnnnnnnnnnnnnnnnnnnnnnnnnnnnnnnnnnnnnnnnnnnnnnnnnnnnnnnnnnnnnnnnnnnnnnnnnnnnnnnnnnnnnnnnnnnnnnnnnnnnnnnnnnnnnnnnnnnnnnnnnnnnnnnnnnnnnnnnnnnnnnnnnnnnnnnnnnnnnnnnnnnnnnnnnnnnnnnnnnnnnnnnnnnnnnnnnnnnnnnnnnnnnnnnnnnnnnnnnnnnnnnnnnnnnnnnnnnnnnnnnnnnnnnnnnnnnnnnnnnnnnnnnnnnnnnnnnnnnnnnnnnnnnnnnnnnnnnnnnnnnnnnnnnnnnnnnnnnnnnnnnnnnnnnnnnnnnnnnnnnnnnnnnnnnnnnnnnnnnnnnnnnnnnnnnnnnnnnnnnnnnnnnnnnnnnnnnnnnnnnnnnnnnnnnnnnnnnnnnnnnnnnnnnnnnnnnnnnnnnnnnnnnnnnnnnnnnnnnnnnnnnnnnnnnnnnnnnnnnnnnnnnnnnnnnnnnnnnnnnnnnnnnnnnnnnnnnnnnnnnnnnnnnnnnnnnnnnnnnnnnnnnnnnnnnnnnnnnnnnnnnnnnnnnnnnnnnnnnnnnnnnnnnnnnnnnnnnnnnnnnnnnnnnnnnnnnnnnnnnnnnnnnnnnnnnnnnnnnnnnnnnnnnnnnnnnnnnnnnnnnnnnnnnnnnnnnnnnnnnnnnnnnnnnnnnnnnnnnnnnnnnnnnnnnnnnnnnnnnnnnnnnnnnnnnnnnnnnnnnnnnnnnnnnnnnnnnnnnnnnnnnnnnnnnnnnnnnnnnnnnnnnnnnnnnnnnnnnnnnnnnnnnnnnnnnnnnnnnnnnnnnnnnnnnnnnnnnnnnnnnnnnnnnnnnnnnnnnnnnnnnnnnnnnnnnnnnnnnnnnnnnnnnnnnnnnnnnnnnnnnnnnnnnnnnnnnnnnnnnnnnnnnnnnnnnnnnnnnnnnnnnnnnnnnnnnnnnnnnnnnnnnnnnnnnnnnnnnnnnnnnnnnnnnnnnnnnnnnnnnnnnnnnnnnnnnnnnnnnnnnnnnnnnnnnnnnnnnnnnnnnnnnnnnnnnnnnnnnnnnnnnnnnnnnnnnnnnnnnnnnnnnnnnnnnnnnnnnnnnnnnnnnnnnnnnnnnnnnnnnnnnnnnnnnnnnnnnnnnnnnnnnnnnnnnnnnnnnnnnnnnnnnnnnnnnnnnnnnnnnnnnnnnnnnnnnnnnnnnnnnnnnnnnnnnnnnnnnnnnnnnnnnnnnnnnnnnnnnnnnnnnnnnnnnnnnnnnnnnnnnnnnnnnnnnnnnnnnnnnnnnnnnnnnnnnnnnnnnnnnnnnnnnnnnnnnnnnnnnnnnnnnnnnnnnnnnnnnnnnnnnnnnnnnnnnnnnnnnnnnnnnnnnnnnnnnnnnnnnnnnnnnnnnnnnnnnnnnnnnnnnnnnnnnnnnnnnnnnnnnnnnnnnnnnnnnnnnnnnnnnnnnnnnnnnnnnnnnnnnnnnnnnnnnnnnnnnnnnnnnnnnnnnnnnnnnnnnnnnnnnnnnnnnnnnnnnnnnnnnnnnnnnnnnnnnnnnnnnnnnnnnnnnnnnnnnnnnnnnnnnnnnnnnnnnnnnnnnnnnnnnnnnnnnnnnnnnnnnnnnnnnnnnnnnnnnnnnnnnnnnnnnnnnnnnnnnnnnnnnnnnnnnnnnnnnnnnnnnnnnnnnnnnnnnnnnnnnnnnnnnnnnnnnnnnnnnnnnnnnnnnnnnnnnnnnnnnnnnnnnnnnnnnnnnnnnnnnnnnnnnnnnnnnnnnnnnnnnnnnnnnnnnnnnnnnnnnnnnnnnnnnnnnnnnnnnnnnnnnnnnnnnnnnnnnnnnnnnnnnnnnnnnnnnnnnnnnnnnnnnnnnnnnnnnnnnnnnnnnnnnnnnnnnnnnnnnnnnnnnnnnnnnnnnnnnnnnnnnnnnnnnnnnnnnnnnnnnnnnnnnnnnnnnnnnnnnnnnnnnnnnnnnnnnnnnnnnnnnnnnnnnnnnnnnnnnnnnnnnnnnnnnnnnnnnnnnnnnnnnnnnnnnnnnnnnnnnnnnnnnnnnnnnnnnnnnnnnnnnnnnnnnnnnnnnnnnnnnnnnnnnnnnnnnnnnnnnnnnnnnnnnnnnnnnnnnnnnnnnnnnnnnnnnnnnnnnnnnnnnnnnnnnnnnnnnnnnnnnnnnnnnnnnnnnnnnnnnnnnnnnnnnnnnnnnnnnnnnnnnnnnnnnnnnnnnnnnnnnnnnnnnnnnnnnnnnnnnnnnnnnnnnnnnnnnnnnnnnnnnnnnnnnnnnnnnnnnnnnnnnnnnnnnnnnnnnnnnnnnnnnnnnnnnnnnnnnnnnnnnnnnnnnnnnnnnnnnnnnnnnnnnnnnnnnnnnnnnnnnnnnnnnnnnnnnnnnnnnnnnnnnnnnnnnnnnnnnnnnnnnnnnnnnnnnnnnnnnnnnnnnnnnnnnnnnnnnnnnnnnnnnnnnnnnnnnnnnnnnnnnnnnnnnnnnnnnnnnnnnnnnnnnnnnnnnnnnnnnnnnnnnnnnnnnnnnnnnnnnnnnnnnnnnnnnnnnnnnnnnnnnnnnnnnnnnnnnnnnnnnnnnnnnnnnnnnnnnnnnnnnnnnnnnnnnnnnnnnnnnnnnnnnnnnnnnnnnnnnnnnnnnnnnnnnnnnnnnnnnnnnnnnnnnnnnnnnnnnnnnnnnnnnnnnnnnnnnnnnnnnnnnnnnnnnnnnnnnnnnnnnnnnnnnnnnnnnnnnnnnnnnnnnnnnnnnnnnnnnnnnnnnnnnnnnnnnnnnnnnnnnnnnnnnnnnnnnnnnnnnnnnnnnnnnnnnnnnnnnnnnnnnnnnnnnnnnnnnnnnnnnnnnnnnnnnnnnnnnnnnnnnnnnnnnnnnnnnnnnnnnnnnnnnnnnnnnnnnnnnnnnnnnnnnnnnnnnnnnnnnnnnnnnnnnnnnnnnnnnnnnnnnnnnnnnnnnnnnnnnnnnnnnnnnnnnnnnnnnnnnnnnnnnnnnnnnnnnnnnnnnnnnnnnnnnnnnnnnnnnnnnnnnnnnnnnnnnnnnnnnnnnnnnnnnnnnnnnnnnnnnnnnnnnnnnnnnnnnnnnnnnnnnnnnnnnnnnnnnnnnnnnnnnnnnnnnnnnnnnnnnnnnnnnnnnnnnnnnnnnnnnnnnnnnnnnnnnnnnnnnnnnnnnnnnnnnnnnnnnnnnnnnnnnnnnnnnnnnnnnnnnnnnnnnnnnnnnnnnnnnnnnnnnnnnnnnnnnnnnnnnnnnnnnnnnnnnnnnnnnnnnnnnnnnnnnnnnnnnnnnnnnnnnnnnnnnnnnnnnnnnnnnnnnnnnnnnnnnnnnnnnnnnnnnnnnnnnnnnnnnnnnnnnnnnnnnnnnnnnnnnnnnnnnnnnnnnnnnnnnnnnnnnnnnnnnnnnnnnnnnnnnnnnnnnnnnnnnnnnnnnnnnnnnnnnnnnnnnnnnnnnnnnnnnnnnnnnnnnnnnnnnnnnnnnnnnnnnnnnnnnnnnnnnnnnnnnnnnnnnnnnnnnnnnnnnnnnnnnnnnnnnnnnnnnnnnnnnnnnnnnnnnnnnnnnnnnnnnnnnnnnnnnnnnnnnnnnnnnnnnnnnnnnnnnnnnnnnnnnnnnnnnnnnnnnnnnnnnnnnnnnnnnnnnnnnnnnnnnnnnnnnnnnnnnnnnnnnnnnnnnnnnnnnnnnnnnnnnnnnnnnnnnnnnnnnnnnnnnnnnnnnnnnnnnnnnnnnnnnnnnnnnnnnnnnnnnnnnnnnnnnnnnnnnnnnnnnnnnnnnnnnnnnnnnnnnnnnnnnnnnnnnnnnnnnnnnnnnnnnnnnnnnnnnnnnnnnnnnnnnnnnnnnnnnnnnnnnnnnnnnnnnnnnnnnnnnnnnnnnnnnnnnnnnnnnnnnnnnnnnnnnnnnnnnnnnnnnnnnnnnnnnnnnnnnnnnnnnnnnnnnnnnnnnnnnnnnnnnnnnnnnnnnnnnnnnnnnnnnnnnnnnnnnnnnnnnnnnnnnnnnnnnnnnnnnnnnnnnnnnnnnnnnnnnnnnnnnnnnnnnnnnnnnnnnnnnnnnnnnnnnnnnnnnnnnnnnnnnnnnnnnnnnnnnnnnnnnnnnnnnnnnnnnnnnnnnnnnnnnnnnnnnnnnnnnnnnnnnnnnnnnnnnnnnnnnnnnnnnnnnnnnnnnnnnnnnnnnnnnnnnnnnnnnnnnnnnnnnnnnnnnnnnnnnnnnnnnnnnnnnnnnnnnnnnnnnnnnnnnnnnnnnnnnnnnnnnnnnnnnnnnnnnnnnnnnnnnnnnnnnnnnnnnnnnnnnnnnnnnnnnnnnnnnnnnnnnnnnnnnnnnnnnnnnnnnnnnnnnnnnnnnnnnnnnnnnnnnnnnnnnnnnnnnnnnnnnnnnnnnnnnnnnnnnnnnnnnnnnnnnnnnnnnnnnnnnnnnnnnnnnnnnnnnnnnnnnnnnnnnnnnnnnnnnnnnnnnnnnnnnnnnnnnnnnnnnnnnnnnnnnnnnnnnnnnnnnnnnnnnnnnnnnnnnnnnnnnnnnnnnnnnnnnnnnnnnnnnnnnnnnnnnnnnnnnnnnnnnnnnnnnnnnnnnnnnnnnnnnnnnnnnnnnnnnnnnnnnnnnnnnnnnnnnnnnnnnnnnnnnnnnnnnnnnnnnnnnnnnnnnnnnnnnnnnnnnnnnnnnnnnnnnnnnnnnnnnnnnnnnnnnnnnnnnnnnnnnnnnnnnnnnnnnnnnnnnnnnnnnnnnnnnnnnnnnnnnnnnnnnnnnnnnnnnnnnnnnnnnnnnnnnnnnnnnnnnnnnnnnnnnnnnnnnnnnnnnnnnnnnnnnnnnnnnnnnnnnnnnnnnnnnnnnnnnnnnnnnnnnnnnnnnnnnnnnnnnnnnnnnnnnnnnnnnnnnnnnnnnnnnnnnnnnnnnnnnnnnnnnnnnnnnnnnnnnnnnnnnnnnnnnnnnnnnnnnnnnnnnnnnnnnnnnnnnnnnnnnnnnnnnnnnnnnnnnnnnnnnnnnnnnnnnnnnnnnnnnnnnnnnnnnnnnnnnnnnnnnnnnnnnnnnnnnnnnnnnnnnnnnnnnnnnnnnnnnnnnnnnnnnnnnnnnnnnnnnnnnnnnnnnnnnnnnnnnnnnnnnnnnnnnnnnnnnnnnnnnnnnnnnnnnnnnnnnnnnnnnnnnnnnnnnnnnnnnnnnnnnnnnnnnnnnnnnnnnnnnnnnnnnnnnnnnnnnnnnnnnnnnnnnnnnnnnnnnnnnnnnnnnnnnnnnnnnnnnnnnnnnnnnnnnnnnnnnnnnnnnnnnnnnnnnnnnnnnnnnnnnnnnnnnnnnnnnnnnnnnnnnnnnnnnnnnnnnnnnnnnnnnnnnnnnnnnnnnnnnnnnnnnnnnnnnnnnnnnnnnnnnnnnnnnnnnnnnnnnnnnnnnnnnnnnnnnnnnnnnnnnnnnnnnnnnnnnnnnnnnnnnnnnnnnnnnnnnnnnnnnnnnnnnnnnnnnnnnnnnnnnnnnnnnnnnnnnnnnnnnnnnnnnnnnnnnnnnnnnnnnnnnnnnnnnnnnnnnnnnnnnnnnnnnnnnnnnnnnnnnnnnnnnnnnnnnnnnnnnnnnnnnnnnnnnnnnnnnnnnnnnnnnnnnnnnnnnnnnnnnnnnnnnnnnnnnnnnnnnnnnnnnnnnnnnnnnnnnnnnnnnnnnnnnnnnnnnnnnnnnnnnnnnnnnnnnnnnnnnnnnnnnnnnnnnnnnnnnnnnnnnnnnnnnnnnnnnnnnnnnnnnnnnnnnnnnnnnnnnnnnnnnnnnnnnnnnnnnnnnnnnnnnnnnnnnnnnnnnnnnnnnnnnnnnnnnnnnnnnnnnnnnnnnnnnnnnnnnnnnnnnnnnnnnnnnnnnnnnnnnnnnnnnnnnnnnnnnnnnnnnnnnnnnnnnnnnnnnnnnnnnnnnnnnnnnnnnnnnnnnnnnnnnnnnnnnnnnnnnnnnnnnnnnnnnnnnnnnnnnnnnnnnnnnnnnnnnnnnnnnnnnnnnnnnnnnnnnnnnnnnnnnnnnnnnnnnnnnnnnnnnnnnnnnnnnnnnnnnnnnnnnnnnnnnnnnnnnnnnnnnnnnnnnnnnnnnnnnnnnnnnnnnnnnnnnnnnnnnnnnnnnnnnnnnnnnnnnnnnnnnnnnnnnnnnnnnnnnnnnnnnnnnnnnnnnnnnnnnnnnnnnnnnnnnnnnnnnnnnnnnnnnnnnnnnnnnnnnnnnnnnnnnnnnnnnnnnnnnnnnnnnnnnnnnnnnnnnnnnnnnnnnnnnnnnnnnnnnnnnnnnnnnnnnnnnnnnnnnnnnnnnnnnnnnnnnnnnnnnnnnnnnnnnnnnnnnnnnnnnnnnnnnnnnnnnnnnnnnnnnnnnnnnnnnnnnnnnnnnnnnnnnnnnnnnnnnnnnnnnnnnnnnnnnnnnnnnnnnnnnnnnnnnnnnnnnnnnnnnnnnnnnnnnnnnnnnnnnnnnnnnnnnnnnnnnnnnnnnnnnnnnnnnnnnnnnnnnnnnnnnnnnnnnnnnnnnnnnnnnnnnnnnnnnnnnnnnnnnnnnnnnnnnnnnnnnnnnnnnnnnnnnnnnnnnnnnnnnnnnnnnnnnnnnnnnnnnnnnnnnnnnnnnnnnnnnnnnnnnnnnnnnnnnnnnnnnnnnnnnnnnnnnnnnnnnnnnnnnnnnnnnnnnnnnnnnnnnnnnnnnnnnnnnnnnnnnnnnnnnnnnnnnnnnnnnnnnnnnnnnnnnnnnnnnnnnnnnnnnnnnnnnnnnnnnnnnnnnnnnnnnnnnnnnnnnnnnnnnnnnnnnnnnnnnnnnnnnnnnnnnnnnnnnnnnnnnnnnnnnnnnnnnnnnnnnnnnnnnnnnnnnnnnnnnnnnnnnnnnnnnnnnnnnnnnnnnnnnnnnnnnnnnnnnnnnnnnnnnnnnnnnnnnnnnnnnnnnnnnnnnnnnnnnnnnnnnnnnnnnnnnnnnnnnnnnnnnnnnnnnnnnnnnnnnnnnnnnnnnnnnnnnnnnnnnnnnnnnnnnnnnnnnnnnnnnnnnnnnnnnnnnnnnnnnnnnnnnnnnnnnnnnnnnnnnnnnnnnnnnnnnnnnnnnnnnnnnnnnnnnnnnnnnnnnnnnnnnnnnnnnnnnnnnnnnnnnnnnnnnnnnnnnnnnnnnnnnnnnnnnnnnnnnnnnnnnnnnnnnnnnnnnnnnnnnnnnnnnnnnnnnnnnnnnnnnnnnnnnnnnnnnnnnnnnnnnnnnnnnnnnnnnnnnnnnnnnnnnnnnnnnnnnnnnnnnnnnnnnnnnnnnnnnnnnnnnnnnnnnnnnnnnnnnnnnnnnnnnnnnnnnnnnnnnnnnnnnnnnnnnnnnnnnnnnnnnnnnnnnnnnnnnnnnnnnnnnnnnnnnnnnnnnnnnnnnnnnnnnnnnnnnnnnnnnnnnnnnnnnnnnnnnnnnnnnnnnnnnnnnnnnnnnnnnnnnnnnnnnnnnnnnnnnnnnnnnnnnnnnnnnnnnnnnnnnnnnnnnnnnnnnnnnnnnnnnnnnnnnnnnnnnnnnnnnnnnnnnnnnnnnnnnnnnnnnnnnnnnnnnnnnnnnnnnnnnnnnnnnnnnnnnnnnnnnnnnnnnnnnnnnnnnnnnnnnnnnnnnnnnnnnnnnnnnnnnnnnnnnnnnnnnnnnnnnnnnnnnnnnnnnnnnnnnnnnnnnnnnnnnnnnnnnnnnnnnnnnnnnnnnnnnnnnnnnnnnnnnnnnnnnnnnnnnnnnnnnnnnnnnnnnnnnnnnnnnnnnnnnnnnnnnnnnnnnnnnnnnnnnnnnnnnnnnnnnnnnnnnnnnnnnnnnnnnnnnnnnnnnnnnnnnnnnnnnnnnnnnnnnnnnnnnnnnnnnnnnnnnnnnnnnnnnnnnnnnnnnnnnnnnnnnnnnnnnnnnnnnnnnnnnnnnnnnnnnnnnnnnnnnnnnnnnnnnnnnnnnnnnnnnnnnnnnnnnnnnnnnnnnnnnnnnnnnnnnnnnnnnnnnnnnnnnnnnnnnnnnnnnnnnnnnnnnnnnnnnnnnnnnnnnnnnnnnnnnnnnnnnnnnnnnnnnnnnnnnnnnnnnnnnnnnnnnnnnnnnnnnnnnnnnnnnnnnnnnnnnnnnnnnnnnnnnnnnnnnnnnnnnnnnnnnnnnnnnnnnnnnnnnnnnnnnnnnnnnnnnnnnnnnnnnnnnnnnnnnnnnnnnnnnnnnnnnnnnnnnnnnnnnnnnnnnnnnnnnnnnnnnnnnnnnnnnnnnnnnnnnnnnnnnnnnnnnnnnnnnnnnnnnnnnnnnnnnnnnnnnnnnnnnnnnnnnnnnnnnnnnnnnnnnnnnnnnnnnnnnnnnnnnnnnnnnnnnnnnnnnnnnnnnnnnnnnnnnnnnnnnnnnnnnnnnnnnnnnnnnnnnnnnnnnnnnnnnnnnnnnnnnnnnnnnnnnnnnnnnnnnnnnnnnnnnnnnnnnnnnnnnnnnnnnnnnnnnnnnnnnnnnnnnnnnnnnnnnnnnnnnnnnnnnnnnnnnnnnnnnnnnnnnnnnnnnnnnnnnnnnnnnnnnnnnnnnnnnnnnnnnnnnnnnnnnnnnnnnnnnnnnnnnnnnnnnnnnnnnnnnnnnnnnnnnnnnnnnnnnnnnnnnnnnnnnnnnnnnnnnnnnnnnnnnnnnnnnnnnnnnnnnnnnnnnnnnnnnnnnnnnnnnnnnnnnnnnnnnnnnnnnnnnnnnnnnnnnnnnnnnnnnnnnnnnnnnnnnnnnnnnnnnnnnnnnnnnnnnnnnnnnnnnnnnnnnnnnnnnnnnnnnnnnnnnnnnnnnnnnnnnnnnnnnnnnnnnnnnnnnnnnnnnnnnnnnnnnnnnnnnnnnnnnnnnnnnnnnnnnnnnnnnnnnnnnnnnnnnnnnnnnnnnnnnnnnnnnnnnnnnnnnnnnnnnnnnnnnnnnnnnnnnnnnnnnnnnnnnnnnnnnnnnnnnnnnnnnnnnnnnnnnnnnnnnnnnnnnnnnnnnnnnnnnnnnnnnnnnnnnnnnnnnnnnnnnnnnnnnnnnnnnnnnnnnnnnnnnnnnnnnnnnnnnnnnnnnnnnnnnnnnnnnnnnnnnnnnnnnnnnnnnnnnnnnnnnnnnnnnnnnnnnnnnnnnnnnnnnnnnnnnnnnnnnnnnnnnnnnnnnnnnnnnnnnnnnnnnnnnnnnnnnnnnnnnnnnnnnnnnnnnnnnnnnnnnnnnnnnnnnnnnnnnnnnnnnnnnnnnnnnnnnnnnnnnnnnnnnnnnnnnnnnnnnnnnnnnnnnnnnnnnnnnnnnnnnnnnnnnnnnnnnnnnnnnnnnnnnnnnnnnnnnnnnnnnnnnnnnnnnnnnnnnnnnnnnnnnnnnnnnnnnnnnnnnnnnnnnnnnnnnnnnnnnnnnnnnnnnnnnnnnnnnnnnnnnnnnnnnnnnnnnnnnnnnnnnnnnnnnnnnnnnnnnnnnnnnnnnnnnnnnnnnnnnnnnnnnnnnnnnnnnnnnnnnnnnnnnnnnnnnnnnnnnnnnnnnnnnnnnnnnnnnnnnnnnnnnnnnnnnnnnnnnnnnnnnnnnnnnnnnnnnnnnnnnnnnnnnnnnnnnnnnnnnnnnnnnnnnnnnnnnnnnnnnnnnnnnnnnnnnnnnnnnnnnnnnnnnnnnnnnnnnnnnnnnnnnnnnnnnnnnnnnnnnnnnnnnnnnnnnnnnnnnnnnnnnnnnnnnnnnnnnnnnnnnnnnnnnnnnnnnnnnnnnnnnnnnnnnnnnnnnnnnnnnnnnnnnnnnnnnnnnnnnnnnnnnnnnnnnnnnnnnnnnnnnnnnnnnnnnnnnnnnnnnnnnnnnnnnnnnnnnnnnnnnnnnnnnnnnnnnnnnnnnnnnnnnnnnnnnnnnnnnnnnnnnnnnnnnnnnnnnnnnnnnnnnnnnnnnnnnnnnnnnnnnnnnnnnnnnnnnnnnnnnnnnnnnnnnnnnnnnnnnnnnnnnnnnnnnnnnnnnnnnnnnnnnnnnnnnnnnnnnnnnnnnnnnnnnnnnnnnnnnnnnnnnnnnnnnnnnnnnnnnnnnnnnnnnnnnnnnnnnnnnnnnnnnnnnnnnnnnnnnnnnnnnnnnnnnnnnnnnnnnnnnnnnnnnnnnnnnnnnnnnnnnnnnnnnnnnnnnnnnnnnnnnnnnnnnnnnnnnnnnnnnnnnnnnnnnnnnnnnnnnnnnnnnnnnnnnnnnnnnnnnnnnnnnnnnnnnnnnnnnnnnnnnnnnnnnnnnnnnnnnnnnnnnnnnnnnnnnnnnnnnnnnnnnnnnnnnnnnnnnnnnnnnnnnnnnnnnnnnnnnnnnnnnnnnnnnnnnnnnnnnnnnnnnnnnnnnnnnnnnnnnnnnnnnnnnnnnnnnnnnnnnnnnnnnnnnnnnnnnnnnnnnnnnnnnnnnnnnnnnnnnnnnnnnnnnnnnnnnnnnnnnnnnnnnnnnnnnnnnnnnnnnnnnnnnnnnnnnnnnnnnnnnnnnnnnnnnnnnnnnnnnnnnnnnnnnnnnnnnnnnnnnnnnnnnnnnnnnnnnnnnnnnnnnnnnnnnnnnnnnnnnnnnnnnnnnnnnnnnnnnnnnnnnnnnnnnnnnnnnnnnnnnnnnnnnnnnnnnnnnnnnnnnnnnnnnnnnnnnnnnnnnnnnnnnnnnnnnnnnnnnnnnnnnnnnnnnnnnnnnnnnnnnnnnnnnnnnnnnnnnnnnnnnnnnnnnnnnnnnnnnnnnnnnnnnnnnnnnnnnnnnnnnnnnnnnnnnnnnnnnnnnnnnnnnnnnnnnnnnnnnnnnnnnnnnnnnnnnnnnnnnnnnnnnnnnnnnnnnnnnnnnnnnnnnnnnnnnnnnnnnnnnnnnnnnnnnnnnnnnnnnnnnnnnnnnnnnnnnnnnnnnnnnnnnnnnnnnnnnnnnnnnnnnnnnnnnnnnnnnnnnnnnnnnnnnnnnnnnnnnnnnnnnnnnnnnnnnnnnnnnnnnnnnnnnnnnnnnnnnnnnnnnnnnnnnnnnnnnnnnnnnnnnnnnnnnnnnnnnnnnnnnnnnnnnnnnnnnnnnnnnnnnnnnnnnnnnnnnnnnnnnnnnnnnnnnnnnnnnnnnnnnnnnnnnnnnnnnnnnnnnnnnnnnnnnnnnnnnnnnnnnnnnnnnnnnnnnnnnnnnnnnnnnnnnnnnnnnnnnnnnnnnnnnnnnnnnnnnnnnnnnnnnnnnnnnnnnnnnnnnnnnnnnnnnnnnnnnnnnnnnnnnnnnnnnnnnnnnnnnnnnnnnnnnnnnnnnnnnnnnnnnnnnnnnnnnnnnnnnnnnnnnnnnnnnnnnnnnnnnnnnnnnnnnnnnnnnnnnnnnnnnnnnnnnnnnnnnnnnnnnnnnnnnnnnnnnnnnnnnnnnnnnnnnnnnnnnnnnnnnnnnnnnnnnnnnnnnnnnnnnnnnnnnnnnnnnnnnnnnnnnnnnnnnnnnnnnnnnnnnnnnnnnnnnnnnnnnnnnnnnnnnnnnnnnnnnnnnnnnnnnnnnnnnnnnnnnnnnnnnnnnnnnnnnnnnnnnnnnnnnnnnnnnnnnnnnnnnnnnnnnnnnnnnnnnnnnnnnnnnnnnnnnnnnnnnnnnnnnnnnnnnnnnnnnnnnnnnnnnnnnnnnnnnnnnnnnnnnnnnnnnnnnnnnnnnnnnnnnnnnnnnnnnnnnnnnnnnnnnnnnnnnnnnnnnnnnnnnnnnnnnnnnnnnnnnnnnnnnnnnnnnnnnnnnnnnnnnnnnnnnnnnnnnnnnnnnnnnnnnnnnnnnnnnnnnnnnnnnnnnnnnnnnnnnnnnnnnnnnnnnnnnnnnnnnnnnnnnnnnnnnnnnnnnnnnnnnnnnnnnnnnnnnnnnnnnnnnnnnnnnnnnnnnnnnnnnnnnnnnnnnnnnnnnnnnnnnnnnnnnnnnnnnnnnnnnnnnnnnnnnnnnnnnnnnnnnnnnnnnnnnnnnnnnnnnnnnnnnnnnnnnnnnnnnnnnnnnnnnnnnnnnnnnnnnnnnnnnnnnnnnnnnnnnnnnnnnnnnnnnnnnnnnnnnnnnnnnnnnnnnnnnnnnnnnnnnnnnnnnnnnnnnnnnnnnnnnnnnnnnnnnnnnnnnnnnnnnnnnnnnnnnnnnnnnnnnnnnnnnnnnnnnnnnnnnnnnnnnnnnnnnnnnnnnnnnnnnnnnnnnnnnnnnnnnnnnnnnnnnnnnnnnnnnnnnnnnnnnnnnnnnnnnnnnnnnnnnnnnnnnnnnnnnnnnnnnnnnnnnnnnnnnnnnnnnnnnnnnnnnnnnnnnnnnnnnnnnnnnnnnnnnnnnnnnnnnnnnnnnnnnnnnnnnnnnnnnnnnnnnnnnnnnnnnnnnnnnnnnnnnnnnnnnnnnnnnnnnnnnnnnnnnnnnnnnnnnnnnnnnnnnnnnnnnnnnnnnnnnnnnnnnnnnnnnnnnnnnnnnnnnnnnnnnnnnnnnnnnnnnnnnnnnnnnnnnnnnnnnnnnnnnnnnnnnnnnnnnnnnnnnnnnnnnnnnnnnnnnnnnnnnnnnnnnnnnnnnnnnnnnnnnnnnnnnnnnnnnnnnnnnnnnnnnnnnnnnnnnnnnnnnnnnnnnnnnnnnnnnnnnnnnnnnnnnnnnnnnnnnnnnnnnnnnnnnnnnnnnnnnnnnnnnnnnnnnnnnnnnnnnnnnnnnnnnnnnnnnnnnnnnnnnnnnnnnnnnnnnnnnnnnnnnnnnnnnnnnnnnnnnnnnnnnnnnnnnnnnnnnnnnnnnnnnnnnnnnnnnnnnnnnnnnnnnnnnnnnnnnnnnnnnnnnnnnnnnnnnnnnnnnnnnnnnnnnnnnnnnnnnnnnnnnnnnnnnnnnnnnnnnnnnnnnnnnnnnnnnnnnnnnnnnnnnnnnnnnnnnnnnnnnnnnnnnnnnnnnnnnnnnnnnnnnnnnnnnnnnnnnnnnnnnnnnnnnnnnnnnnnnnnnnnnnnnnnnnnnnnnnnnnnnnnnnnnnnnnnnnnnnnnnnnnnnnnnnnnnnnnnnnnnnnnnnnnnnnnnnnnnnnnnnnnnnnnnnnnnnnnnnnnnnnnnnnnnnnnnnnnnnnnnnnnnnnnnnnnnnnnnnnnnnnnnnnnnnnnnnnnnnnnnnnnnnnnnnnnnnnnnnnnnnnnnnnnnnnnnnnnnnnnnnnnnnnnnnnnnnnnnnnnnnnnnnnnnnnnnnnnnnnnnnnnnnnnnnnnnnnnnnnnnnnnnnnnnnnnnnnnnnnnnnnnnnnnnnnnnnnnnnnnnnnnnnnnnnnnnnnnnnnnnnnnnnnnnnnnnnnnnnnnnnnnnnnnnnnnnnnnnnnnnnnnnnnnnnnnnnnnnnnnnnnnnnnnnnnnnnnnnnnnnnnnnnnnnnnnnnnnnnnnnnnnnnnnnnnnnnnnnnnnnnnnnnnnnnnnnnnnnnnnnnnnnnnnnnnnnnnnnnnnnnnnnnnnnnnnnnnnnnnnnnnnnnnnnnnnnnnnnnnnnnnnnnnnnnnnnnnnnnnnnnnnnnnnnnnnnnnnnnnnnnnnnnnnnnnnnnnnnnnnnnnnnnnnnnnnnnnnnnnnnnnnnnnnnnnnnnnnnnnnnnnnnnnnnnnnnnnnnnnnnnnnnnnnnnnnnnnnnnnnnnnnnnnnnnnnnnnnnnnnnnnnnnnnnnnnnnnnnnnnnnnnnnnnnnnnnnnnnnnnnnnnnnnnnnnnnnnnnnnnnnnnnnnnnnnnnnnnnnnnnnnnnnnnnnnnnnnnnnnnnnnnnnnnnnnnnnnnnnnnnnnnnnnnnnnnnnnnnnnnnnnnnnnnnnnnnnnnnnnnnnnnnnnnnnnnnnnnnnnnnnnnnnnnnnnnnnnnnnnnnnnnnnnnnnnnnnnnnnnnnnnnnnnnnnnnnnnnnnnnnnnnnnnnnnnnnnnnnnnnnnnnnnnnnnnnnnnnnnnnnnnnnnnnnnnnnnnnnnnnnnnnnnnnnnnnnnnnnnnnnnnnnnnnnnnnnnnnnnnnnnnnnnnnnnnnnnnnnnnnnnnnnnnnnnnnnnnnnnnnnnnnnnnnnnnnnnnnnnnnnnnnnnnnnnnnnnnnnnnnnnnnnnnnnnnnnnnnnnnnnnnnnnnnnnnnnnnnnnnnnnnnnnnnnnnnnnnnnnnnnnnnnnnnnnnnnnnnnnnnnnnnnnnnnnnnnnnnnnnnnnnnnnnnnnnnnnnnnnnnnnnnnnnnnnnnnnnnnnnnnnnnnnnnnnnnnnnnnnnnnnnnnnnnnnnnnnnnnnnnnnnnnnnnnnnnnnnnnnnnnnnnnnnnnnnnnnnnnnnnnnnnnnnnnnnnnnnnnnnnnnnnnnnnnnnnnnnnnnnnnnnnnnnnnnnnnnnnnnnnnnnnnnnnnnnnnnnnnnnnnnnnnnnnnnnnnnnnnnnnnnnnnnnnnnnnnnnnnnnnnnnnnnnnnnnnnnnnnnnnnnnnnnnnnnnnnnnnnnnnnnnnnnnnnnnnnnnnnnnnnnnnnnnnnnnnnnnnnnnnnnnnnnnnnnnnnnnnnnnnnnnnnnnnnnnnnnnnnnnnnnnnnnnnnnnnnnnnnnnnnnnnnnnnnnnnnnnnnnnnnnnnnnnnnnnnnnnnnnnnnnnnnnnnnnnnnnnnnnnnnnnnnnnnnnnnnnnnnnnnnnnnnnnnnnnnnnnnnnnnnnnnnnnnnnnnnnnnnnnnnnnnnnnnnnnnnnnnnnnnnnnnnnnnnnnnnnnnnnnnnnnnnnnnnnnnnnnnnnnnnnnnnnnnnnnnnnnnnnnnnnnnnnnnnnnnnnnnnnnnnnnnnnnnnnnnnnnnnnnnnnnnnnnnnnnnnnnnnnnnnnnnnnnnnnnnnnnnnnnnnnnnnnnnnnnnnnnnnnnnnnnnnnnnnnnnnnnnnnnnnnnnnnnnnnnnnnnnnnnnnnnnnnnnnnnnnnnnnnnnnnnnnnnnnnnnnnnnnnnnnnnnnnnnnnnnnnnnnnnnnnnnnnnnnnnnnnnnnnnnnnnnnnnnnnnnnnnnnnnnnnnnnnnnnnnnnnnnnnnnnnnnnnnnnnnnnnnnnnnnnnnnnnnnnnnnnnnnnnnnnnnnnnnnnnnnnnnnnnnnnnnnnnnnnnnnnnnnnnnnnnnnnnnnnnnnnnnnnnnnnnnnnnnnnnnnnnnnnnnnnnnnnnnnnnnnnnnnnnnnnnnnnnnnnnnnnnnnnnnnnnnnnnnnnnnnnnnnnnnnnnnnnnnnnnnnnnnnnnnnnnnnnnnnnnnnnnnnnnnnnnnnnnnnnnnnnnnnnnnnnnnnnnnnnnnnnnnnnnnnnnnnnnnnnnnnnnnnnnnnnnnnnnnnnnnnnnnnnnnnnnnnnnnnnnnnnnnnnnnnnnnnnnnnnnnnnnnnnnnnnnnnnnnnnnnnnnnnnnnnnnnnnnnnnnnnnnnnnnnnnnnnnnnnnnnnnnnnnnnnnnnnnnnnnnnnnnnnnnnnnnnnnnnnnnnnnnnnnnnnnnnnnnnnnnnnnnnnnnnnnnnnnnnnnnnnnnnnnnnnnnnnnnnnnnnnnnnnnnnnnnnnnnnnnnnnnnnnnnnnnnnnnnnnnnnnnnnnnnnnnnnnnnnnnnnnnnnnnnnnnnnnnnnnnnnnnnnnnnnnnnnnnnnnnnnnnnnnnnnnnnnnnnnnnnnnnnnnnnnnnnnnnnnnnnnnnnnnnnnnnnnnnnnnnnnnnnnnnnnnnnnnnnnnnnnnnnnnnnnnnnnnnnnnnnnnnnnnnnnnnnnnnnnnnnnnnnnnnnnnnnnnnnnnnnnnnnnnnnnnnnnnnnnnnnnnnnnnnnnnnnnnnnnnnnnnnnnnnnnnnnnnnnnnnnnnnnnnnnnnnnnnnnnnnnnnnnnnnnnnnnnnnnnnnnnnnnnnnnnnnnnnnnnnnnnnnnnnnnnnnnnnnnnnnnnnnnnnnnnnnnnnnnnnnnnnnnnnnnnnnnnnnnnnnnnnnnnnnnnnnnnnnnnnnnnnnnnnnnnnnnnnnnnnnnnnnnnnnnnnnnnnnnnnnnnnnnnnnnnnnnnnnnnnnnnnnnnnnnnnnnnnnnnnnnnnnnnnnnnnnnnnnnnnnnnnnnnnnnnnnnnnnnnnnnnnnnnnnnnnnnnnnnnnnnnnnnnnnnnnnnnnnnnnnnnnnnnnnnnnnnnnnnnnnnnnnnnnnnnnnnnnnnnnnnnnnnnnnnnnnnnnnnnnnnnnnnnnnnnnnnnnnnnnnnnnnnnnnnnnnnnnnnnnnnnnnnnnnnnnnnnnnnnnnnnnnnnnnnnnnnnnnnnnnnnnnnnnnnnnnnnnnnnnnnnnnnnnnnnnnnnnnnnnnnnnnnnnnnnnnnnnnnnnnnnnnnnnnnnnnnnnnnnnnnnnnnnnnnnnnnnnnnnnnnnnnnnnnnnnnnnnnnnnnnnnnnnnnnnnnnnnnnnnnnnnnnnnnnnnnnnnnnnnnnnnnnnnnnnnnnnnnnnnnnnnnnnnnnnnnnnnnnnnnnnnnnnnnnnnnnnnnnnnnnnnnnnnnnnnnnnnnnnnnnnnnnnnnnnnnnnnnnnnnnnnnnnnnnnnnnnnnnnnnnnnnnnnnnnnnnnnnnnnnnnnnnnnnnnnnnnnnnnnnnnnnnnnnnnnnnnnnnnnnnnnnnnnnnnnnnnnnnnnnnnnnnnnnnnnnnnnnnnnnnnnnnnnnnnnnnnnnnnnnnnnnnnnnnnnnnnnnnnnnnnnnnnnnnnnnnnnnnnnnnnnnnnnnnnnnnnnnnnnnnnnnnnnnnnnnnnnnnnnnnnnnnnnnnnnnnnnnnnnnnnnnnnnnnnnnnnnnnnnnnnnnnnnnnnnnnnnnnnnnnnnnnnnnnnnnnnnnnnnnnnnnnnnnnnnnnnnnnnnnnnnnnnnnnnnnnnnnnnnnnnnnnnnnnnnnnnnnnnnnnnnnnnnnnnnnnnnnnnnnnnnnnnnnnnnnnnnnnnnnnnnnnnnnnnnnnnnnnnnnnnnnnnnnnnnnnnnnnnnnnnnnnnnnnnnnnnnnnnnnnnnnnnnnnnnnnnnnnnnnnnnnnnnnnnnnnnnnnnnnnnnnnnnnnnnnnnnnnnnnnnnnnnnnnnnnnnnnnnnnnnnnnnnnnnnnnnnnnnnnnnnnnnnnnnnnnnnnnnnnnnnnnnnnnnnnnnnnnnnnnnnnnnnnnnnnnnnnnnnnnnnnnnnnnnnnnnnnnnnnnnnnnnnnnnnnnnnnnnnnnnnnnnnnnnnnnnnnnnnnnnnnnnnnnnnnnnnnnnnnnnnnnnnnnnnnnnnnnnnnnnnnnnnnnnnnnnnnnnnnnnnnnnnnnnnnnnnnnnnnnnnnnnnnnnnnnnnnnnnnnnnnnnnnnnnnnnnnnnnnnnnnnnnnnnnnnnnnnnnnnnnnnnnnnnnnnnnnnnnnnnnnnnnnnnnnnnnnnnnnnnnnnnnnnnnnnnnnnnnnnnnnnnnnnnnnnnnnnnnnnnnnnnnnnnnnnnnnnnnnnnnnnnnnnnnnnnnnnnnnnnnnnnnnnnnnnnnnnnnnnnnnnnnnnnnnnnnnnnnnnnnnnnnnnnnnnnnnnnnnnnnnnnnnnnnnnnnnnnnnnnnnnnnnnnnnnnnnnnnnnnnnnnnnnnnnnnnnnnnnnnnnnnnnnnnnnnnnnnnnnnnnnnnnnnnnnnnnnnnnnnnnnnnnnnnnnnnnnnnnnnnnnnnnnnnnnnnnnnnnnnnnnnnnnnnnnnnnnnnnnnnnnnnnnnnnnnnnnnnnnnnnnnnnnnnnnnnnnnnnnnnnnnnnnnnnnnnnnnnnnnnnnnnnnnnnnnnnnnnnnnnnnnnnnnnnnnnnnnnnnnnnnnnnnnnnnnnnnnnnnnnnnnnnnnnnnnnnnnnnnnnnnnnnnnnnnnnnnnnnnnnnnnnnnnnnnnnnnnnnnnnnnnnnnnnnnnnnnnnnnnnnnnnnnnnnnnnnnnnnnnnnnnnnnnnnnnnnnnnnnnnnnnnnnnnnnnnnnnnnnnnnnnnnnnnnnnnnnnnnnnnnnnnnnnnnnnnnnnnnnnnnnnnnnnnnnnnnnnnnnnnnnnnnnnnnnnnnnnnnnnnnnnnnnnnnnnnnnnnnnnnnnnnnnnnnnnnnnnnnnnnnnnnnnnnnnnnnnnnnnnnnnnnnnnnnnnnnnnnnnnnnnnnnnnnnnnnnnnnnnnnnnnnnnnnnnnnnnnnnnnnnnnnnnnnnnnnnnnnnnnnnnnnnnnnnnnnnnnnnnnnnnnnnnnnnnnnnnnnnnnnnnnnnnnnnnnnnnnnnnnnnnnnnnnnnnnnnnnnnnnnnnnnnnnnnnnnnnnnnnnnnnnnnnnnnnnnnnnnnnnnnnnnnnnnnnnnnnnnnnnnnnnnnnnnnnnnnnnnnnnnnnnnnnnnnnnnnnnnnnnnnnnnnnnnnnnnnnnnnnnnnnnnnnnnnnnnnnnnnnnnnnnnnnnnnnnnnnnnnnnnnnnnnnnnnnnnnnnnnnnnnnnnnnnnnnnnnnnnnnnnnnnnnnnnnnnnnnnnnnnnnnnnnnnnnnnnnnnnnnnnnnnnnnnnnnnnnnnnnnnnnnnnnnnnnnnnnnnnnnnnnnnnnnnnnnnnnnnnnnnnnnnnnnnnnnnnnnnnnnnnnnnnnnnnnnnnnnnnnnnnnnnnnnnnnnnnnnnnnnnnnnnnnnnnnnnnnnnnnnnnnnnnnnnnnnnnnnnnnnnnnnnnnnnnnnnnnnnnnnnnnnnnnnnnnnnnnnnnnnnnnnnnnnnnnnnnnnnnnnnnnnnnnnnnnnnnnnnnnnnnnnnnnnnnnnnnnnnnnnnnnnnnnnnnnnnnnnnnnnnnnnnnnnnnnnnnnnnnnnnnnnnnnnnnnnnnnnnnnnnnnnnnnnnnnnnnnnnnnnnnnnnnnnnnnnnnnnnnnnnnnnnnnnnnnnnnnnnnnnnnnnnnnnnnnnnnnnnnnnnnnnnnnnnnnnnnnnnnnnnnnnnnnnnnnnnnnnnnnnnnnnnnnnnnnnnnnnnnnnnnnnnnnnnnnnnnnnnnnnnnnnnnnnnnnnnnnnnnnnnnnnnnnnnnnnnnnnnnnnnnnnnnnnnnnnnnnnnnnnnnnnnnnnnnnnnnnnnnnnnnnnnnnnnnnnnnnnnnnnnnnnnnnnnnnnnnnnnnnnnnnnnnnnnnnnnnnnnnnnnnnnnnnnnnnnnnnnnnnnnnnnnnnnnnnnnnnnnnnnnnnnnnnnnnnnnnnnnnnnnnnnnnnnnnnnnnnnnnnnnnnnnnnnnnnnnnnnnnnnnnnnnnnnnnnnnnnnnnnnnnnnnnnnnnnnnnnnnnnnnnnnnnnnnnnnnnnnnnnnnnnnnnnnnnnnnnnnnnnnnnnnnnnnnnnnnnnnnnnnnnnnnnnnnnnnnnnnnnnnnnnnnnnnnnnnnnnnnnnnnnnnnnnnnnnnnnnnnnnnnnnnnnnnnnnnnnnnnnnnnnnnnnnnnnnnnnnnnnnnnnnnnnnnnnnnnnnnnnnnnnnnnnnnnnnnnnnnnnnnnnnnnnnnnnnnnnnnnnnnnnnnnnnnnnnnnnnnnnnnnnnnnnnnnnnnnnnnnnnnnnnnnnnnnnnnnnnnnnnnnnnnnnnnnnnnnnnnnnnnnnnnnnnnnnnnnnnnnnnnnnnnnnnnnnnnnnnnnnnnnnnnnnnnnnnnnnnnnnnnnnnnnnnnnnnnnnnnnnnnnnnnnnnnnnnnnnnnnnnnnnnnnnnnnnnnnnnnnnnnnnnnnnnnnnnnnnnnnnnnnnnnnnnnnnnnnnnnnnnnnnnnnnnnnnnnnnnnnnnnnnnnnnnnnnnnnnnnnnnnnnnnnnnnnnnnnnnnnnnnnnnnnnnnnnnnnnnnnnnnnnnnnnnnnnnnnnnnnnnnnnnnnnnnnnnnnnnnnnnnnnnnnnnnnnnnnnnnnnnnnnnnnnnnnnnnnnnnnnnnnnnnnnnnnnnnnnnnnnnnnnnnnnnnnnnnnnnnnnnnnnnnnnnnnnnnnnnnnnnnnnnnnnnnnnnnnnnnnnnnnnnnnnnnnnnnnnnnnnnnnnnnnnnnnnnnnnnnnnnnnnnnnnnnnnnnnnnnnnnnnnnnnnnnnnnnnnnnnnnnnnnnnnnnnnnnnnnnnnnnnnnnnnnnnnnnnnnnnnnnnnnnnnnnnnnnnnnnnnnnnnnnnnnnnnnnnnnnnnnnnnnnnnnnnnnnnnnnnnnnnnnnnnnnnnnnnnnnnnnnnnnnnnnnnnnnnnnnnnnnnnnnnnnnnnnnnnnnnnnnnnnnnnnnnnnnnnnnnnnnnnnnnnnnnnnnnnnnnnnnnnnnnnnnnnnnnnnnnnnnnnnnnnnnnnnnnnnnnnnnnnnnnnnnnnnnnnnnnnnnnnnnnnnnnnnnnnnnnnnnnnnnnnnnnnnnnnnnnnnnnnnnnnnnnnnnnnnnnnnnnnnnnnnnnnnnnnnnnnnnnnnnnnnnnnnnnnnnnnnnnnnnnnnnnnnnnnnnnnnnnnnnnnnnnnnnnnnnnnnnnnnnnnnnnnnnnnnnnnnnnnnnnnnnnnnnnnnnnnnnnnnnnnnnnnnnnnnnnnnnnnnnnnnnnnnnnnnnnnnnnnnnnnnnnnnnnnnnnnnnnnnnnnnnnnnnnnnnnnnnnnnnnnnnnnnnnnnnnnnnnnnnnnnnnnnnnnnnnnnnnnnnnnnnnnnnnnnnnnnnnnnnnnnnnnnnnnnnnnnnnnnnnnnnnnnnnnnnnnnnnnnnnnnnnnnnnnnnnnnnnnnnnnnnnnnnnnnnnnnnnnnnnnnnnnnnnnnnnnnnnnnnnnnnnnnnnnnnnnnnnnnnnnnnnnnnnnnnnnnnnnnnnnnnnnnnnnnnnnnnnnnnnnnnnnnnnnnnnnnnnnnnnnnnnnnnnnnnnnnnnnnnnnnnnnnnnnnnnnnnnnnnnnnnnnnnnnnnnnnnnnnnnnnnnnnnnnnnnnnnnnnnnnnnnnnnnnnnnnnnnnnnnnnnnnnnnnnnnnnnnnnnnnnnnnnnnnnnnnnnnnnnnnnnnnnnnnnnnnnnnnnnnnnnnnnnnnnnnnnnnnnnnnnnnnnnnnnnnnnnnnnnnnnnnnnnnnnnnnnnnnnnnnnnnnnnnnnnnnnnnnnnnnnnnnnnnnnnnnnnnnnnnnnnnnnnnnnnnnnnnnnnnnnnnnnnnnnnnnnnnnnnnnnnnnnnnnnnnnnnnnnnnnnnnnnnnnnnnnnnnnnnnnnnnnnnnnnnnnnnnnnnnnnnnnnnnnnnnnnnnnnnnnnnnnnnnnnnnnnnnnnnnnnnnnnnnnnnnnnnnnnnnnnnnnnnnnnnnnnnnnnnnnnnnnnnnnnnnnnnnnnnnnnnnnnnnnnnnnnnnnnnnnnnnnnnnnnnnnnnnnnnnnnnnnnnnnnnnnnnnnnnnnnnnnnnnnnnnnnnnnnnnnnnnnnnnnnnnnnnnnnnnnnnnnnnnnnnnnnnnnnnnnnnnnnnnnnnnnnnnnnnnnnnnnnnnnnnnnnnnnnnnnnnnnnnnnnnnnnnnnnnnnnnnnnnnnnnnnnnnnnnnnnnnnnnnnnnnnnnnnnnnnnnnnnnnnnnnnnnnnnnnnnnnnnnnnnnnnnnnnnnnnnnnnnnnnnnnnnnnnnnnnnnnnnnnnnnnnnnnnnnnnnnnnnnnnnnnnnnnnnnnnnnnnnnnnnnnnnnnnnnnnnnnnnnnnnnnnnnnnnnnnnnnnnnnnnnnnnnnnnnnnnnnnnnnnnnnnnnnnnnnnnnnnnnnnnnnnnnnnnnnnnnnnnnnnnnnnnnnnnnnnnnnnnnnnnnnnnnnnnnnnnnnnnnnnnnnnnnnnnnnnnnnnnnnnnnnnnnnnnnnnnnnnnnnnnnnnnnnnnnnnnnnnnnnnnnnnnnnnnnnnnnnnnnnnnnnnnnnnnnnnnnnnnnnnnnnnnnnnnnnnnnnnnnnnnnnnnnnnnnnnnnnnnnnnnnnnnnnnnnnnnnnnnnnnnnnnnnnnnnnnnnnnnnnnnnnnnnnnnnnnnnnnnnnnnnnnnnnnnnnnnnnnnnnnnnnnnnnnnnnnnnnnnnnnnnnnnnnnnnnnnnnnnnnnnnnnnnnnnnnnnnnnnnnnnnnnnnnnnnnnnnnnnnnnnnnnnnnnnnnnnnnnnnnnnnnnnnnnnnnnnnnnnnnnnnnnnnnnnnnnnnnnnnnnnnnnnnnnnnnnnnnnnnnnnnnnnnnnnnnnnnnnnnnnnnnnnnnnnnnnnnnnnnnnnnnnnnnnnnnnnnnnnnnnnnnnnnnnnnnnnnnnnnnnnnnnnnnnnnnnnnnnnnnnnnnnnnnnnnnnnnnnnnnnnnnnnnnnnnnnnnnnnnnnnnnnnnnnnnnnnnnnnnnnnnnnnnnnnnnnnnnnnnnnnnnnnnnnnnnnnnnnnnnnnnnnnnnnnnnnnnnnnnnnnnnnnnnnnnnnnnnnnnnnnnnnnnnnnnnnnnnnnnnnnnnnnnnnnnnnnnnnnnnnnnnnnnnnnnnnnnnnnnnnnnnnnnnnnnnnnnnnnnnnnnnnnnnnnnnnnnnnnnnnnnnnnnnnnnnnnnnnnnnnnnnnnnnnnnnnnnnnnnnnnnnnnnnnnnnnnnnnnnnnnnnnnnnnnnnnnnnnnnnnnnnnnnnnnnnnnnnnnnnnnnnnnnnnnnnnnnnnnnnnnnnnnnnnnnnnnnnnnnnnnnnnnnnnnnnnnnnnnnnnnnnnnnnnnnnnnnnnnnnnnnnnnnnnnnnnnnnnnnnnnnnnnnnnnnnnnnnnnnnnnnnnnnnnnnnnnnnnnnnnnnnnnnnnnnnnnnnnnnnnnnnnnnnnnnnnnnnnnnnnnnnnnnnnnnnnnnnnnnnnnnnnnnnnnnnnnnnnnnnnnnnnnnnnnnnnnnnnnnnnnnnnnnnnnnnnnnnnnnnnnnnnnnnnnnnnnnnnnnnnnnnnnnnnnnnnnnnnnnnnnnnnnnnnnnnnnnnnnnnnnnnnnnnnnnnnnnnnnnnnnnnnnnnnnnnnnnnnnnnnnnnnnnnnnnnnnnnnnnnnnnnnnnnnnnnnnnnnnnnnnnnnnnnnnnnnnnnnnnnnnnnnnnnnnnnnnnnnnnnnnnnnnnnnnnnnnnnnnnnnnnnnnnnnnnnnnnnnnnnnnnnnnnnnnnnnnnnnnnnnnnnnnnnnnnnnnnnnnnnnnnnnnnnnnnnnnnnnnnnnnnnnnnnnnnnnnnnnnnnnnnnnnnnnnnnnnnnnnnnnnnnnnnnnnnnnnnnnnnnnnnnnnnnnnnnnnnnnnnnnnnnnnnnnnnnnnnnnnnnnnnnnnnnnnnnnnnnnnnnnnnnnnnnnnnnnnnnnnnnnnnnnnnnnnnnnnnnnnnnnnnnnnnnnnnnnnnnnnnnnnnnnnnnnnnnnnnnnnnnnnnnnnnnnnnnnnnnnnnnnnnnnnnnnnnnnnnnnnnnnnnnnnnnnnnnnnnnnnnnnnnnnnnnnnnnnnnnnnnnnnnnnnnnnnnnnnnnnnnnnnnnnnnnnnnnnnnnnnnnnnnnnnnnnnnnnnnnnnnnnnnnnnnnnnnnnnnnnnnnnnnnnnnnnnnnnnnnnnnnnnnnnnnnnnnnnnnnnnnnnnnnnnnnnnnnnnnnnnnnnnnnnnnnnnnnnnnnnnnnnnnnnnnnnnnnnnnnnnnnnnnnnnnnnnnnnnnnnnnnnnnnnnnnnnnnnnnnnnnnnnnnnnnnnnnnnnnnnnnnnnnnnnnnnnnnnnnnnnnnnnnnnnnnnnnnnnnnnnnnnnnnnnnnnnnnnnnnnnnnnnnnnnnnnnnnnnnnnnnnnnnnnnnnnnnnnnnnnnnnnnnnnnnnnnnnnnnnnnnnnnnnnnnnnnnnnnnnnnnnnnnnnnnnnnnnnnnnnnnnnnnnnnnnnnnnnnnnnnnnnnnnnnnnnnnnnnnnnnnnnnnnnnnnnnnnnnnnnnnnnnnnnnnnnnnnnnnnnnnnnnnnnnnnnnnnnnnnnnnnnnnnnnnnnnnnnnnnnnnnnnnnnnnnnnnnnnnnnnnnnnnnnnnnnnnnnnnnnnnnnnnnnnnnnnnnnnnnnnnnnnnnnnnnnnnnnnnnnnnnnnnnnnnnnnnnnnnnnnnnnnnnnnnnnnnnnnnnnnnnnnnnnnnnnnnnnnnnnnnnnnnnnnnnnnnnnnnnnnnnnnnnnnnnnnnnnnnnnnnnnnnnnnnnnnnnnnnnnnnnnnnnnnnnnnnnnnnnnnnnnnnnnnnnnnnnnnnnnnnnnnnnnnnnnnnnnnnnnnnnnnnnnnnnnnnnnnnnnnnnnnnnnnnnnnnnnnnnnnnnnnnnnnnnnnnnnnnnnnnnnnnnnnnnnnnnnnnnnnnnnnnnnnnnnnnnnnnnnnnnnnnnnnnnnnnnnnnnnnnnnnnnnnnnnnnnnnnnnnnnnnnnnnnnnnnnnnnnnnnnnnnnnnnnnnnnnnnnnnnnnnnnnnnnnnnnnnnnnnnnnnnnnnnnnnnnnnnnnnnnnnnnnnnnnnnnnnnnnnnnnnnnnnnnnnnnnnnnnnnnnnnnnnnnnnnnnnnnnnnnnnnnnnnnnnnnnnnnnnnnnnnnnnnnnnnnnnnnnnnnnnnnnnnnnnnnnnnnnnnnnnnnnnnnnnnnnnnnnnnnnnnnnnnnnnnnnnnnnnnnnnnnnnnnnnnnnnnnnnnnnnnnnnnnnnnnnnnnnnnnnnnnnnnnnnnnnnnnnnnnnnnnnnnnnnnnnnnnnnnnnnnnnnnnnnnnnnnnnnnnnnnnnnnnnnnnnnnnnnnnnnnnnnnnnnnnnnnnnnnnnnnnnnnnnnnnnnnnnnnnnnnnnnnnnnnnnnnnnnnnnnnnnnnnnnnnnnnnnnnnnnnnnnnnnnnnnnnnnnnnnnnnnnnnnnnnnnnnnnnnnnnnnnnnnnnnnnnnnnnnnnnnnnnnnnnnnnnnnnnnnnnnnnnnnnnnnnnnnnnnnnnnnnnnnnnnnnnnnnnnnnnnnnnnnnnnnnnnnnnnnnnnnnnnnnnnnnnnnnnnnnnnnnnnnnnnnnnnnnnnnnnnnnnnnnnnnnnnnnnnnnnnnnnnnnnnnnnnnnnnnnnnnnnnnnnnnnnnnnnnnnnnnnnnnnnnnnnnnnnnnnnnnnnnnnnnnnnnnnnnnnnnnnnnnnnnnnnnnnnnnnnnnnnnnnnnnnnnnnnnnnnnnnnnnnnnnnnnnnnnnnnnnnnnnnnnnnnnnnnnnnnnnnnnnnnnnnnnnnnnnnnnnnnnnnnnnnnnnnnnnnnnnnnnnnnnnnnnnnnnnnnnnnnnnnnnnnnnnnnnnnnnnnnnnnnnnnnnnnnnnnnnnnnnnnnnnnnnnnnnnnnnnnnnnnnnnnnnnnnnnnnnnnnnnnnnnnnnnnnnnnnnnnnnnnnnnnnnnnnnnnnnnnnnnnnnnnnnnnnnnnnnnnnnnnnnnnnnnnnnnnnnnnnnnnnnnnnnnnnnnnnnnnnnnnnnnnnnnnnnnnnnnnnnnnnnnnnnnnnnnnnnnnnnnnnnnnnnnnnnnnnnnnnnnnnnnnnnnnnnnnnnnnnnnnnnnnnnnnnnnnnnnnnnnnnnnnnnnnnnnnnnnnnnnnnnnnnnnnnnnnnnnnnnnnnnnnnnnnnnnnnnnnnnnnnnnnnnnnnnnnnnnnnnnnnnnnnnnnnnnnnnnnnnnnnnnnnnnnnnnnnnnnnnnnnnnnnnnnnnnnnnnnnnnnnnnnnnnnnnnnnnnnnnnnnnnnnnnnnnnnnnnnnnnnnnnnnnnnnnnnnnnnnnnnnnnnnnnnnnnnnnnnnnnnnnnnnnnnnnnnnnnnnnnnnnnnnnnnnnnnnnnnnnnnnnnnnnnnnnnnnnnnnnnnnnnnnnnnnnnnnnnnnnnnnnnnnnnnnnnnnnnnnnnnnnnnnnnnnnnnnnnnnnnnnnnnnnnnnnnnnnnnnnnnnnnnnnnnnnnnnnnnnnnnnnnnnnnnnnnnnnnnnnnnnnnnnnnnnnnnnnnnnnnnnnnnnnnnnnnnnnnnnnnnnnnnnnnnnnnnnnnnnnnnnnnnnnnnnnnnnnnnnnnnnnnnnnnnnnnnnnnnnnnnnnnnnnnnnnnnnnnnnnnnnnnnnnnnnnnnnnnnnnnnnnnnnnnnnnnnnnnnnnnnnnnnnnnnnnnnnnnnnnnnnnnnnnnnnnnnnnnnnnnnnnnnnnnnnnnnnnnnnnnnnnnnnnnnnnnnnnnnnnnnnnnnnnnnnnnnnnnnnnnnnnnnnnnnnnnnnnnnnnnnnnnnnnnnnnnnnnnnnnnnnnnnnnnnnnnnnnnnnnnnnnnnnnnnnnnnnnnnnnnnnnnnnnnnnnnnnnnnnnnnnnnnnnnnnnnnnnnnnnnnnnnnnnnnnnnnnnnnnnnnnnnnnnnnnnnnnnnnnnnnnnnnnnnnnnnnnnnnnnnnnnnnnnnnnnnnnnnnnnnnnnnnnnnnnnnnnnnnnnnnnnnnnnnnnnnnnnnnnnnnnnnnnnnnnnnnnnnnnnnnnnnnnnnnnnnnnnnnnnnnnnnnnnnnnnnnnnnnnnnnnnnnnnnnnnnnnnnnnnnnnnnnnnnnnnnnnnnnnnnnnnnnnnnnnnnnnnnnnnnnnnnnnnnnnnnnnnnnnnnnnnnnnnnnnnnnnnnnnnnnnnnnnnnnnnnnnnnnnnnnnnnnnnnnnnnnnnnnnnnnnnnnnnnnnnnnnnnnnnnnnnnnnnnnnnnnnnnnnnnnnnnnnnnnnnnnnnnnnnnnnnnnnnnnnnnnnnnnnnnnnnnnnnnnnnnnnnnnnnnnnnnnnnnnnnnnnnnnnnnnnnnnnnnnnnnnnnnnnnnnnnnnnnnnnnnnnnnnnnnnnnnnnnnnnnnnnnnnnnnnnnnnnnnnnnnnnnnnnnnnnnnnnnnnnnnnnnnnnnnnnnnnnnnnnnnnnnnnnnnnnnnnnnnnnnnnnnnnnnnnnnnnnnnnnnnnnnnnnnnnnnnnnnnnnnnnnnnnnnnnnnnnnnnnnnnnnnnnnnnnnnnnnnnnnnnnnnnnnnnnnnnnnnnnnnnnnnnnnnnnnnnnnnnnnnnnnnnnnnnnnnnnnnnnnnnnnnnnnnnnnnnnnnnnnnnnnnnnnnnnnnnnnnnnnnnnnnnnnnnnnnnnnnnnnnnnnnnnnnnnnnnnnnnnnnnnnnnnnnnnnnnnnnnnnnnnnnnnnnnnnnnnnnnnnnnnnnnnnnnnnnnnnnnnnnnnnnnnnnnnnnnnnnnnnnnnnnnnnnnnnnnnnnnnnnnnnnnnnnnnnnnnnnnnnnnnnnnnnnnnnnnnnnnnnnnnnnnnnnnnnnnnnnnnnnnnnnnnnnnnnnnnnnnnnnnnnnnnnnnnnnnnnnnnnnnnnnnnnnnnnnnnnnnnnnnnnnnnnnnnnnnnnnnnnnnnnnnnnnnnnnnnnnnnnnnnnnnnnnnnnnnnnnnnnnnnnnnnnnnnnnnnnnnnnnnnnnnnnnnnnnnnnnnnnnnnnnnnnnnnnnnnnnnnnnnnnnnnnnnnnnnnnnnnnnnnnnnnnnnnnnnnnnnnnnnnnnnnnnnnnnnnnnnnnnnnnnnnnnnnnnnnnnnnnnnnnnnnnnnnnnnnnnnnnnnnnnnnnnnnnnnnnnnnnnnnnnnnnnnnnnnnnnnnnnnnnnnnnnnnnnnnnnnnnnnnnnnnnnnnnnnnnnnnnnnnnnnnnnnnnnnnnnnnnnnnnnnnnnnnnnnnnnnnnnnnnnnnnnnnnnnnnnnnnnnnnnnnnnnnnnnnnnnnnnnnnnnnnnnnnnnnnnnnnnnnnnnnnnnnnnnnnnnnnnnnnnnnnnnnnnnnnnnnnnnnnnnnnnnnnnnnnnnnnnnnnnnnnnnnnnnnnnnnnnnnnnnnnnnnnnnnnnnnnnnnnnnnnnnnnnnnnnnnnnnnnnnnnnnnnnnnnnnnnnnnnnnnnnnnnnnnnnnnnnnnnnnnnnnnnnnnnnnnnnnnnnnnnnnnnnnnnnnnnnnnnnnnnnnnnnnnnnnnnnnnnnnnnnnnnnnnnnnnnnnnnnnnnnnnnnnnnnnnnnnnnnnnnnnnnnnnnnnnnnnnnnnnnnnnnnnnnnnnnnnnnnnnnnnnnnnnnnnnnnnnnnnnnnnnnnnnnnnnnnnnnnnnnnnnnnnnnnnnnnnnnnnnnnnnnnnnnnnnnnnnnnnnnnnnnnnnnnnnnnnnnnnnnnnnnnnnnnnnnnnnnnnnnnnnnnnnnnnnnnnnnnnnnnnnnnnnnnnnnnnnnnnnnnnnnnnnnnnnnnnnnnnnnnnnnnnnnnnnnnnnnnnnnnnnnnnnnnnnnnnnnnnnnnnnnnnnnnnnnnnnnnnnnnnnnnnnnnnnnnnnnnnnnnnnnnnnnnnnnnnnnnnnnnnnnnnnnnnnnnnnnnnnnnnnnnnnnnnnnnnnnnnnnnnnnnnnnnnnnnnnnnnnnnnnnnnnnnnnnnnnnnnnnnnnnnnnnnnnnnnnnnnnnnnnnnnnnnnnnnnnnnnnnnnnnnnnnnnnnnnnnnnnnnnnnnnnnnnnnnnnnnnnnnnnnnnnnnnnnnnnnnnnnnnnnnnnnnnnnnnnnnnnnnnnnnnnnnnnnnnnnnnnnnnnnnnnnnnnnnnnnnnnnnnnnnnnnnnnnnnnnnnnnnnnnnnnnnnnnnnnnnnnnnnnnnnnnnnnnnnnnnnnnnnnnnnnnnnnnnnnnnnnnnnnnnnnnnnnnnnnnnnnnnnnnnnnnnnnnnnnnnnnnnnnnnnnnnnnnnnnnnnnnnnnnnnnnnnnnnnnnnnnnnnnnnnnnnnnnnnnnnnnnnnnnnnnnnnnnnnnnnnnnnnnnnnnnnnnnnnnnnnnnnnnnnnnnnnnnnnnnnnnnnnnnnnnnnnnnnnnnnnnnnnnnnnnnnnnnnnnnnnnnnnnnnnnnnnnnnnnnnnnnnnnnnnnnnnnnnnnnnnnnnnnnnnnnnnnnnnnnnnnnnnnnnnnnnnnnnnnnnnnnnnnnnnnnnnnnnnnnnnnnnnnnnnnnnnnnnnnnnnnnnnnnnnnnnnnnnnnnnnnnnnnnnnnnnnnnnnnnnnnnnnnnnnnnnnnnnnnnnnnnnnnnnnnnnnnnnnnnnnnnnnnnnnnnnnnnnnnnnnnnnnnnnnnnnnnnnnnnnnnnnnnnnnnnnnnnnnnnnnnnnnnnnnnnnnnnnnnnnnnnnnnnnnnnnnnnnnnnnnnnnnnnnnnnnnnnnnnnnnnnnnnnnnnnnnnnnnnnnnnnnnnnnnnnnnnnnnnnnnnnnnnnnnnnnnnnnnnnnnnnnnnnnnnnnnnnnnnnnnnnnnnnnnnnnnnnnnnnnnnnnnnnnnnnnnnnnnnnnnnnnnnnnnnnnnnnnnnnnnnnnnnnnnnnnnnnnnnnnnnnnnnnnnnnnnnnnnnnnnnnnnnnnnnnnnnnnnnnnnnnnnnnnnnnnnnnnnnnnnnnnnnnnnnnnnnnnnnnnnnnnnnnnnnnnnnnnnnnnnnnnnnnnnnnnnnnnnnnnnnnnnnnnnnnnnnnnnnnnnnnnnnnnnnnnnnnnnnnnnnnnnnnnnnnnnnnnnnnnnnnnnnnnnnnnnnnnnnnnnnnnnnnnnnnnnnnnnnnnnnnnnnnnnnnnnnnnnnnnnnnnnnnnnnnnnnnnnnnnnnnnnnnnnnnnnnnnnnnnnnnnnnnnnnnnnnnnnnnnnnnnnnnnnnnnnnnnnnnnnnnnnnnnnnnnnnnnnnnnnnnnnnnnnnnnnnnnnnnnnnnnnnnnnnnnnnnnnnnnnnnnnnnnnnnnnnnnnnnnnnnnnnnnnnnnnnnnnnnnnnnnnnnnnnnnnnnnnnnnnnnnnnnnnnnnnnnnnnnnnnnnnnnnnnnnnnnnnnnnnnnnnnnnnnnnnnnnnnnnnnnnnnnnnnnnnnnnnnnnnnnnnnnnnnnnnnnnnnnnnnnnnnnnnnnnnnnnnnnnnnnnnnnnnnnnnnnnnnnnnnnnnnnnnnnnnnnnnnnnnnnnnnnnnnnnnnnnnnnnnnnnnnnnnnnnnnnnnnnnnnnnnnnnnnnnnnnnnnnnnnnnnnnnnnnnnnnnnnnnnnnnnnnnnnnnnnnnnnnnnnnnnnnnnnnnnnnnnnnnnnnnnnnnnnnnnnnnnnnnnnnnnnnnnnnnnnnnnnnnnnnnnnnnnnnnnnnnnnnnnnnnnnnnnnnnnnnnnnnnnnnnnnnnnnnnnnnnnnnnnnnnnnnnnnnnnnnnnnnnnnnnnnnnnnnnnnnnnnnnnnnnnnnnnnnnnnnnnnnnnnnnnnnnnnnnnnnnnnnnnnnnnnnnnnnnnnnnnnnnnnnnnnnnnnnnnnnnnnnnnnnnnnnnnnnnnnnnnnnnnnnnnnnnnnnnnnnnnnnnnnnnnnnnnnnnnnnnnnnnnnnnnnnnnnnnnnnnnnnnnnnnnnnnnnnnnnnnnnnnnnnnnnnnnnnnnnnnnnnnnnnnnnnnnnnnnnnnnnnnnnnnnnnnnnnnnnnnnnnnnnnnnnnnnnnnnnnnnnnnnnnnnnnnnnnnnnnnnnnnnnnnnnnnnnnnnnnnnnnnnnnnnnnnnnnnnnnnnnnnnnnnnnnnnnnnnnnnnnnnnnnnnnnnnnnnnnnnnnnnnnnnnnnnnnnnnnnnnnnnnnnnnnnnnnnnnnnnnnnnnnnnnnnnnnnnnnnnnnnnnnnnnnnnnnnnnnnnnnnnnnnnnnnnnnnnnnnnnnnnnnnnnnnnnnnnnnnnnnnnnnnnnnnnnnnnnnnnnnnnnnnnnnnnnnnnnnnnnnnnnnnnnnnnnnnnnnnnnnnnnnnnnnnnnnnnnnnnnnnnnnnnnnnnnnnnnnnnnnnnnnnnnnnnnnnnnnnnnnnnnnnnnnnnnnnnnnnnnnnnnnnnnnnnnnnnnnnnnnnnnnnnnnnnnnnnnnnnnnnnnnnnnnnnnnnnnnnnnnnnnnnnnnnnnnnnnnnnnnnnnnnnnnnnnnnnnnnnnnnnnnnnnnnnnnnnnnnnnnnnnnnnnnnnnnnnnnnnnnnnnnnnnnnnnnnnnnnnnnnnnnnnnnnnnnnnnnnnnnnnnnnnnnnnnnnnnnnnnnnnnnnnnnnnnnnnnnnnnnnnnnnnnnnnnnnnnnnnnnnnnnnnnnnnnnnnnnnnnnnnnnnnnnnnnnnnnnnnnnnnnnnnnnnnnnnnnnnnnnnnnnnnnnnnnnnnnnnnnnnnnnnnnnnnnnnnnnnnnnnnnnnnnnnnnnnnnnnnnnnnnnnnnnnnnnnnnnnnnnnnnnnnnnnnnnnnnnnnnnnnnnnnnnnnnnnnnnnnnnnnnnnnnnnnnnnnnnnnnnnnnnnnnnnnnnnnnnnnnnnnnnnnnnnnnnnnnnnnnnnnnnnnnnnnnnnnnnnnnnnnnnnnnnnnnnnnnnnnnnnnnnnnnnnnnnnnnnnnnnnnnnnnnnnnnnnnnnnnnnnnnnnnnnnnnnnnnnnnnnnnnnnnnnnnnnnnnnnnnnnnnnnnnnnnnnnnnnnnnnnnnnnnnnnnnnnnnnnnnnnnnnnnnnnnnnnnnnnnnnnnnnnnnnnnnnnnnnnnnnnnnnnnnnnnnnnnnnnnnnnnnnnnnnnnnnnnnnnnnnnnnnnnnnnnnnnnnnnnnnnnnnnnnnnnnnnnnnnnnnnnnnnnnnnnnnnnnnnnnnnnnnnnnnnnnnnnnnnnnnnnnnnnnnnnnnnnnnnnnnnnnnnnnnnnnnnnnnnnnnnnnnnnnnnnnnnnnnnnnnnnnnnnnnnnnnnnnnnnnnnnnnnnnnnnnnnnnnnnnnnnnnnnnnnnnnnnnnnnnnnnnnnnnnnnnnnnnnnnnnnnnnnnnnnnnnnnnnnnnnnnnnnnnnnnnnnnnnnnnnnnnnnnnnnnnnnnnnnnnnnnnnnnnnnnnnnnnnnnnnnnnnnnnnnnnnnnnnnnnnnnnnnnnnnnnnnnnnnnnnnnnnnnnnnnnnnnnnnnnnnnnnnnnnnnnnnnnnnnnnnnnnnnnnnnnnnnnnnnnnnnnnnnnnnnnnnnnnnnnnnnnnnnnnnnnnnnnnnnnnnnnnnnnnnnnnnnnnnnnnnnnnnnnnnnnnnnnnnnnnnnnnnnnnnnnnnnnnnnnnnnnnnnnnnnnnnnnnnnnnnnnnnnnnnnnnnnnnnnnnnnnnnnnnnnnnnnnnnnnnnnnnnnnnnnnnnnnnnnnnnnnnnnnnnnnnnnnnnnnnnnnnnnnnnnnnnnnnnnnnnnnnnnnnnnnnnnnnnnnnnnnnnnnnnnnnnnnnnnnnnnnnnnnnnnnnnnnnnnnnnnnnnnnnnnnnnnnnnnnnnnnnnnnnnnnnnnnnnnnnnnnnnnnnnnnnnnnnnnnnnnnnnnnnnnnnnnnnnnnnnnnnnnnnnnnnnnnnnnnnnnnnnnnnnnnnnnnnnnnnnnnnnnnnnnnnnnnnnnnnnnnnnnnnnnnnnnnnnnnnnnnnnnnnnnnnnnnnnnnnnnnnnnnnnnnnnnnnnnnnnnnnnnnnnnnnnnnnnnnnnnnnnnnnnnnnnnnnnnnnnnnnnnnnnnnnnnnnnnnnnnnnnnnnnnnnnnnnnnnnnnnnnnnnnnnnnnnnnnnnnnnnnnnnnnnnnnnnnnnnnnnnnnnnnnnnnnnnnnnnnnnnnnnnnnnnnnnnnnnnnnnnnnnnnnnnnnnnnnnnnnnnnnnnnnnnnnnnnnnnnnnnnnnnnnnnnnnnnnnnnnnnnnnnnnnnnnnnnnnnnnnnnnnnnnnnnnnnnnnnnnnnnnnnnnnnnnnnnnnnnnnnnnnnnnnnnnnnnnnnnnnnnnnnnnnnnnnnnnnnnnnnnnnnnnnnnnnnnnnnnnnnnnnnnnnnnnnnnnnnnnnnnnnnnnnnnnnnnnnnnnnnnnnnnnnnnnnnnnnnnnnnnnnnnnnnnnnnnnnnnnnnnnnnnnnnnnnnnnnnnnnnnnnnnnnnnnnnnnnnnnnnnnnnnnnnnnnnnnnnnnnnnnnnnnnnnnnnnnnnnnnnnnnnnnnnnnnnnnnnnnnnnnnnnnnnnnnnnnnnnnnnnnnnnnnnnnnnnnnnnnnnnnnnnnnnnnnnnnnnnnnnnnnnnnnnnnnnnnnnnnnnnnnnnnnnnnnnnnnnnnnnnnnnnnnnnnnnnnnnnnnnnnnnnnnnnnnnnnnnnnnnnnnnnnnnnnnnnnnnnnnnnnnnnnnnnnnnnnnnnnnnnnnnnnnnnnnnnnnnnnnnnnnnnnnnnnnnnnnnnnnnnnnnnnnnnnnnnnnnnnnnnnnnnnnnnnnnnnnnnnnnnnnnnnnnnnnnnnnnnnnnnnnnnnnnnnnnnnnnnnnnnnnnnnnnnnnnnnnnnnnnnnnnnnnnnnnnnnnnnnnnnnnnnnnnnnnnnnnnnnnnnnnnnnnnnnnnnnnnnnnnnnnnnnnnnnnnnnnnnnnnnnnnnnnnnnnnnnnnnnnnnnnnnnnnnnnnnnnnnnnnnnnnnnnnnnnnnnnnnnnnnnnnnnnnnnnnnnnnnnnnnnnnnnnnnnnnnnnnnnnnnnnnnnnnnnnnnnnnnnnnnnnnnnnnnnnnnnnnnnnnnnnnnnnnnnnnnnnnnnnnnnnnnnnnnnnnnnnnnnnnnnnnnnnnnnnnnnnnnnnnnnnnnnnnnnnnnnnnnnnnnnnnnnnnnnnnnnnnnnnnnnnnnnnnnnnnnnnnnnnnnnnnnnnnnnnnnnnnnnnnnnnnnnnnnnnnnnnnnnnnnnnnnnnnnnnnnnnnnnnnnnnnnnnnnnnnnnnnnnnnnnnnnnnnnnnnnnnnnnnnnnnnnnnnnnnnnnnnnnnnnnnnnnnnnnnnnnnnnnnnnnnnnnnnnnnnnnnnnnnnnnnnnnnnnnnnnnnnnnnnnnnnnnnnnnnnnnnnnnnnnnnnnnnnnnnnnnnnnnnnnnnnnnnnnnnnnnnnnnnnnnnnnnnnnnnnnnnnnnnnnnnnnnnnnnnnnnnnnnnnnnnnnnnnnnnnnnnnnnnnnnnnnnnnnnnnnnnnnnnnnnnnnnnnnnnnnnnnnnnnnnnnnnnnnnnnnnnnnnnnnnnnnnnnnnnnnnnnnnnnnnnnnnnnnnnnnnnnnnnnnnnnnnnnnnnnnnnnnnnnnnnnnnnnnnnnnnnnnnnnnnnnnnnnnnnnnnnnnnnnnnnnnnnnnnnnnnnnnnnnnnnnnnnnnnnnnnnnnnnnnnnnnnnnnnnnnnnnnnnnnnnnnnnnnnnnnnnnnnnnnnnnnnnnnnnnnnnnnnnnnnnnnnnnnnnnnnnnnnnnnnnnnnnnnnnnnnnnnnnnnnnnnnnnnnnnnnnnnnnnnnnnnnnnnnnnnnnnnnnnnnnnnnnnnnnnnnnnnnnnnnnnnnnnnnnnnnnnnnnnnnnnnnnnnnnnnnnnnnnnnnnnnnnnnnnnnnnnnnnnnnnnnnnnnnnnnnnnnnnnnnnnnnnnnnnnnnnnnnnnnnnnnnnnnnnnnnnnnnnnnnnnnnnnnnnnnnnnnnnnnnnnnnnnnnnnnnnnnnnnnnnnnnnnnnnnnnnnnnnnnnnnnnnnnnnnnnnnnnnnnnnnnnnnnnnnnnnnnnnnnnnnnnnnnnnnnnnnnnnnnnnnnnnnnnnnnnnnnnnnnnnnnnnnnnnnnnnnnnnnnnnnnnnnnnnnnnnnnnnnnnnnnnnnnnnnnnnnnnnnnnnnnnnnnnnnnnnnnnnnnnnnnnnnnnnnnnnnnnnnnnnnnnnnnnnnnnnnnnnnnnnnnnnnnnnnnnnnnnnnnnnnnnnnnnnnnnnnnnnnnnnnnnnnnnnnnnnnnnnnnnnnnnnnnnnnnnnnnnnnnnnnnnnnnnnnnnnnnnnnnnnnnnnnnnnnnnnnnnnnnnnnnnnnnnnnnnnnnnnnnnnnnnnnnnnnnnnnnnnnnnnnnnnnnnnnnnnnnnnnnnnnnnnnnnnnnnnnnnnnnnnnnnnnnnnnnnnnnnnnnnnnnnnnnnnnnnnnnnnnnnnnnnnnnnnnnnnnnnnnnnnnnnnnnnnnnnnnnnnnnnnnnnnnnnnnnnnnnnnnnnnnnnnnnnnnnnnnnnnnnnnnnnnnnnnnnnnnnnnnnnnnnnnnnnnnnnnnnnnnnnnnnnnnnnnnnnnnnnnnnnnnnnnnnnnnnnnnnnnnnnnnnnnnnnnnnnnnnnnnnnnnnnnnnnnnnnnnnnnnnnnnnnnnnnnnnnnnnnnnnnnnnnnnnnnnnnnnnnnnnnnnnnnnnnnnnnnnnnnnnnnnnnnnnnnnnnnnnnnnnnnnnnnnnnnnnnnnnnnnnnnnnnnnnnnnnnnnnnnnnnnnnnnnnnnnnnnnnnnnnnnnnnnnnnnnnnnnnnnnnnnnnnnnnnnnnnnnnnnnnnnnnnnnnnnnnnnnnnnnnnnnnnnnnnnnnnnnnnnnnnnnnnnnnnnnnnnnnnnnnnnnnnnnnnnnnnnnnnnnnnnnnnnnnnnnnnnnnnnnnnnnnnnnnnnnnnnnnnnnnnnnnnnnnnnnnnnnnnnnnnnnnnnnnnnnnnnnnnnnnnnnnnnnnnnnnnnnnnnnnnnnnnnnnnnnnnnnnnnnnnnnnnnnnnnnnnnnnnnnnnnnnnnnnnnnnnnnnnnnnnnnnnnnnnnnnnnnnnnnnnnnnnnnnnnnnnnnnnnnnnnnnnnnnnnnnnnnnnnnnnnnnnnnnnnnnnnnnnnnnnnnnnnnnnnnnnnnnnnnnnnnnnnnnnnnnnnnnnnnnnnnnnnnnnnnnnnnnnnnnnnnnnnnnnnnnnnnnnnnnnnnnnnnnnnnnnnnnnnnnnnnnnnnnnnnnnnnnnnnnnnnnnnnnnnnnnnnnnnnnnnnnnnnnnnnnnnnnnnnnnnnnnnnnnnnnnnnnnnnnnnnnnnnnnnnnnnnnnnnnnnnnnnnnnnnnnnnnnnnnnnnnnnnnnnnnnnnnnnnnnnnnnnnnnnnnnnnnnnnnnnnnnnnnnnnnnnnnnnnnnnnnnnnnnnnnnnnnnnnnnnnnnnnnnnnnnnnnnnnnnnnnnnnnnnnnnnnnnnnnnnnnnnnnnnnnnnnnnnnnnnnnnnnnnnnnnnnnnnnnnnnnnnnnnnnnnnnnnnnnnnnnnnnnnnnnnnnnnnnnnnnnnnnnnnnnnnnnnnnnnnnnnnnnnnnnnnnnnnnnnnnnnnnnnnnnnnnnnnnnnnnnnnnnnnnnnnnnnnnnnnnnnnnnnnnnnnnnnnnnnnnnnnnnnnnnnnnnnnnnnnnnnnnnnnnnnnnnnnnnnnnnnnnnnnnnnnnnnnnnnnnnnnnnnnnnnnnnnnnnnnnnnnnnnnnnnnnnnnnnnnnnnnnnnnnnnnnnnnnnnnnnnnnnnnnnnnnnnnnnnnnnnnnnnnnnnnnnnnnnnnnnnnnnnnnnnnnnnnnnnnnnnnnnnnnnnnnnnnnnnnnnnnnnnnnnnnnnnnnnnnnnnnnnnnnnnnnnnnnnnnnnnnnnnnnnnnnnnnnnnnnnnnnnnnnnnnnnnnnnnnnnnnnnnnnnnnnnnnnnnnnnnnnnnnnnnnnnnnnnnnnnnnnnnnnnnnnnnnnnnnnnnnnnnnnnnnnnnnnnnnnnnnnnnnnnnnnnnnnnnnnnnnnnnnnnnnnnnnnnnnnnnnnnnnnnnnnnnnnnnnnnnnnnnnnnnnnnnnnnnnnnnnnnnnnnnnnnnnnnnnnnnnnnnnnnnnnnnnnnnnnnnnnnnnnnnnnnnnnnnnnnnnnnnnnnnnnnnnnnnnnnnnnnnnnnnnnnnnnnnnnnnnnnnnnnnnnnnnnnnnnnnnnnnnnnnnnnnnnnnnnnnnnnnnnnnnnnnnnnnnnnnnnnnnnnnnnnnnnnnnnnnnnnnnnnnnnnnnnnnnnnnnnnnnnnnnnnnnnnnnnnnnnnnnnnnnnnnnnnnnnnnnnnnnnnnnnnnnnnnnnnnnnnnnnnnnnnnnnnnnnnnnnnnnnnnnnnnnnnnnnnnnnnnnnnnnnnnnnnnnnnnnnnnnnnnnnnnnnnnnnnnnnnnnnnnnnnnnnnnnnnnnnnnnnnnnnnnnnnnnnnnnnnnnnnnnnnnnnnnnnnnnnnnnnnnnnnnnnnnnnnnnnnnnnnnnnnnnnnnnnnnnnnnnnnnnnnnnnnnnnnnnnnnnnnnnnnnnnnnnnnnnnnnnnnnnnnnnnnnnnnnnnnnnnnnnnnnnnnnnnnnnnnnnnnnnnnnnnnnnnnnnnnnnnnnnnnnnnnnnnnnnnnnnnnnnnnnnnnnnnnnnnnnnnnnnnnnnnnnnnnnnnnnnnnnnnnnnnnnnnnnnnnnnnnnnnnnnnnnnnnnnnnnnnnnnnnnnnnnnnnnnnnnnnnnnnnnnnnnnnnnnnnnnnnnnnnnnnnnnnnnnnnnnnnnnnnnnnnnnnnnnnnnnnnnnnnnnnnnnnnnnnnnnnnnnnnnnnnnnnnnnnnnnnnnnnnnnnnnnnnnnnnnnnnnnnnnnnnnnnnnnnnnnnnnnnnnnnnnnnnnnnnnnnnnnnnnnnnnnnnnnnnnnnnnnnnnnnnnnnnnnnnnnnnnnnnnnnnnnnnnnnnnnnnnnnnnnnnnnnnnnnnnnnnnnnnnnnnnnnnnnnnnnnnnnnnnnnnnnnnnnnnnnnnnnnnnnnnnnnnnnnnnnnnnnnnnnnnnnnnnnnnnnnnnnnnnnnnnnnnnnnnnnnnnnnnnnnnnnnnnnnnnnnnnnnnnnnnnnnnnnnnnnnnnnnnnnnnnnnnnnnnnnnnnnnnnnnnnnnnnnnnnnnnnnnnnnnnnnnnnnnnnnnnnnnnnnnnnnnnnnnnnnnnnnnnnnnnnnnnnnnnnnnnnnnnnnnnnnnnnnnnnnnnnnnnnnnnnnnnnnnnnnnnnnnnnnnnnnnnnnnnnnnnnnnnnnnnnnnnnnnnnnnnnnnnnnnnnnnnnnnnnnnnnnnnnnnnnnnnnnnnnnnnnnnnnnnnnnnnnnnnnnnnnnnnnnnnnnnnnnnnnnnnnnnnnnnnnnnnnnnnnnnnnnnnnnnnnnnnnnnnnnnnnnnnnnnnnnnnnnnnnnnnnnnnnnnnnnnnnnnnnnnnnnnnnnnnnnnnnnnnnnnnnnnnnnnnnnnnnnnnnnnnnnnnnnnnnnnnnnnnnnnnnnnnnnnnnnnnnnnnnnnnnnnnnnnnnnnnnnnnnnnnnnnnnnnnnnnnnnnnnnnnnnnnnnnnnnnnnnnnnnnnnnnnnnnnnnnnnnnnnnnnnnnnnnnnnnnnnnnnnnnnnnnnnnnnnnnnnnnnnnnnnnnnnnnnnnnnnnnnnnnnnnnnnnnnnnnnnnnnnnnnnnnnnnnnnnnnnnnnnnnnnnnnnnnnnnnnnnnnnnnnnnnnnnnnnnnnnnnnnnnnnnnnnnnnnnnnnnnnnnnnnnnnnnnnnnnnnnnnnnnnnnnnnnnnnnnnnnnnnnnnnnnnnnnnnnnnnnnnnnnnnnnnnnnnnnnnnnnnnnnnnnnnnnnnnnnnnnnnnnnnnnnnnnnnnnnnnnnnnnnnnnnnnnnnnnnnnnnnnnnnnnnnnnnnnnnnnnnnnnnnnnnnnnnnnnnnnnnnnnnnnnnnnnnnnnnnnnnnnnnnnnnnnnnnnnnnnnnnnnnnnnnnnnnnnnnnnnnnnnnnnnnnnnnnnnnnnnnnnnnnnnnnnnnnnnnnnnnnnnnnnnnnnnnnnnnnnnnnnnnnnnnnnnnnnnnnnnnnnnnnnnnnnnnnnnnnnnnnnnnnnnnnnnnnnnnnnnnnnnnnnnnnnnnnnnnnnnnnnnnnnnnnnnnnnnnnnnnnnnnnnnnnnnnnnnnnnnnnnnnnnnnnnnnnnnnnnnnnnnnnnnnnnnnnnnnnnnnnnnnnnnnnnnnnnnnnnnnnnnnnnnnnnnnnnnnnnnnnnnnnnnnnnnnnnnnnnnnnnnnnnnnnnnnnnnnnnnnnnnnnnnnnnnnnnnnnnnnnnnnnnnnnnnnnnnnnnnnnnnnnnnnnnnnnnnnnnnnnnnnnnnnnnnnnnnnnnnnnnnnnnnnnnnnnnnnnnnnnnnnnnnnnnnnnnnnnnnnnnnnnnnnnnnnnnnnnnnnnnnnnnnnnnnnnnnnnnnnnnnnnnnnnnnnnnnnnnnnnnnnnnnnnnnnnnnnnnnnnnnnnnnnnnnnnnnnnnnnnnnnnnnnnnnnnnnnnnnnnnnnnnnnnnnnnnnnnnnnnnnnnnnnnnnnnnnnnnnnnnnnnnnnnnnnnnnnnnnnnnnnnnnnnnnnnnnnnnnnnnnnnnnnnnnnnnnnnnnnnnnnnnnnnnnnnnnnnnnnnnnnnnnnnnnnnnnnnnnnnnnnnnnnnnnnnnnnnnnnnnnnnnnnnnnnnnnnnnnnnnnnnnnnnnnnnnnnnnnnnnnnnnnnnnnnnnnnnnnnnnnnnnnnnnnnnnnnnnnnnnnnnnnnnnnnnnnnnnnnnnnnnnnnnnnnnnnnnnnnnnnnnnnnnnnnnnnnnnnnnnnnnnnnnnnnnnnnnnnnnnnnnnnnnnnnnnnnnnnnnnnnnnnnnnnnnnnnnnnnnnnnnnnnnnnnnnnnnnnnnnnnnnnnnnnnnnnnnnnnnnnnnnnnnnnnnnnnnnnnnnnnnnnnnnnnnnnnnnnnnnnnnnnnnnnnnnnnnnnnnnnnnnnnnnnnnnnnnnnnnnnnnnnnnnnnnnnnnnnnnnnnnnnnnnnnnnnnnnnnnnnnnnnnnnnnnnnnnnnnnnnnnnnnnnnnnnnnnnnnnnnnnnnnnnnnnnnnnnnnnnnnnnnnnnnnnnnnnnnnnnnnnnnnnnnnnnnnnnnnnnnnnnnnnnnnnnnnnnnnnnnnnnnnnnnnnnnnnnnnnnnnnnnnnnnnnnnnnnnnnnnnnnnnnnnnnnnnnnnnnnnnnnnnnnnnnnnnnnnnnnnnnnnnnnnnnnnnnnnnnnnnnnnnnnnnnnnnnnnnnnnnnnnnnnnnnnnnnnnnnnnnnnnnnnnnnnnnnnnnnnnnnnnnnnnnnnnnnnnnnnnnnnnnnnnnnnnnnnnnnnnnnnnnnnnnnnnnnnnnnnnnnnnnnnnnnnnnnnnnnnnnnnnnnnnnnnnnnnnnnnnnnnnnnnnnnnnnnnnnnnnnnnnnnnnnnnnnnnnnnnnnnnnnnnnnnnnnnnnnnnnnnnnnnnnnnnnnnnnnnnnnnnnnnnnnnnnnnnnnnnnnnnnnnnnnnnnnnnnnnnnnnnnnnnnnnnnnnnnnnnnnnnnnnnnnnnnnnnnnnnnnnnnnnnnnnnnnnnnnnnnnnnnnnnnnnnnnnnnnnnnnnnnnnnnnnnnnnnnnnnnnnnnnnnnnnnnnnnnnnnnnnnnnnnnnnnnnnnnnnnnnnnnnnnnnnnnnnnnnnnnnnnnnnnnnnnnnnnnnnnnnnnnnnnnnnnnnnnnnnnnnnnnnnnnnnnnnnnnnnnnnnnnnnnnnnnnnnnnnnnnnnnnnnnnnnnnnnnnnnnnnnnnnnnnnnnnnnnnnnnnnnnnnnnnnnnnnnnnnnnnnnnnnnnnnnnnnnnnnnnnnnnnnnnnnnnnnnnnnnnnnnnnnnnnnnnnnnnnnnnnnnnnnnnnnnnnnnnnnnnnnnnnnnnnnnnnnnnnnnnnnnnnnnnnnnnnnnnnnnnnnnnnnnnnnnnnnnnnnnnnnnnnnnnnnnnnnnnnnnnnnnnnnnnnnnnnnnnnnnnnnnnnnnnnnnnnnnnnnnnnnnnnnnnnnnnnnnnnnnnnnnnnnnnnnnnnnnnnnnnnnnnnnnnnnnnnnnnnnnnnnnnnnnnnnnnnnnnnnnnnnnnnnnnnnnnnnnnnnnnnnnnnnnnnnnnnnnnnnnnnnnnnnnnnnnnnnnnnnnnnnnnnnnnnnnnnnnnnnnnnnnnnnnnnnnnnnnnnnnnnnnnnnnnnnnnnnnnnnnnnnnnnnnnnnnnnnnnnnnnnnnnnnnnnnnnnnnnnnnnnnnnnnnnnnnnnnnnnnnnnnnnnnnnnnnnnnnnnnnnnnnnnnnnnnnnnnnnnnnnnnnnnnnnnnnnnnnnnnnnnnnnnnnnnnnnnnnnnnnnnnnnnnnnnnnnnnnnnnnnnnnnnnnnnnnnnnnnnnnnnnnnnnnnnnnnnnnnnnnnnnnnnnnnnnnnnnnnnnnnnnnnnnnnnnnnnnnnnnnnnnnnnnnnnnnnnnnnnnnnnnnnnnnnnnnnnnnnnnnnnnnnnnnnnnnnnnnnnnnnnnnnnnnnnnnnnnnnnnnnnnnnnnnnnnnnnnnnnnnnnnnnnnnnnnnnnnnnnnnnnnnnnnnnnnnnnnnnnnnnnnnnnnnnnnnnnnnnnnnnnnnnnnnnnnnnnnnnnnnnnnnnnnnnnnnnnnnnnnnnnnnnnnnnnnnnnnnnnnnnnnnnnnnnnnnnnnnnnnnnnnnnnnnnnnnnnnnnnnnnnnnnnnnnnnnnnnnnnnnnnnnnnnnnnnnnnnnnnnnnnnnnnnnnnnnnnnnnnnnnnnnnnnnnnnnnnnnnnnnnnnnnnnnnnnnnnnnnnnnnnnnnnnnnnnnnnnnnnnnnnnnnnnnnnnnnnnnnnnnnnnnnnnnnnnnnnnnnnnnnnnnnnnnnnnnnnnnnnnnnnnnnnnnnnnnnnnnnnnnnnnnnnnnnnnnnnnnnnnnnnnnnnnnnnnnnnnnnnnnnnnnnnnnnnnnnnnnnnnnnnnnnnnnnnnnnnnnnnnnnnnnnnnnnnnnnnnnnnnnnnnnnnnnnnnnnnnnnnnnnnnnnnnnnnnnnnnnnnnnnnnnnnnnnnnnnnnnnnnnnnnnnnnnnnnnnnnnnnnnnnnnnnnnnnnnnnnnnnnnnnnnnnnnnnnnnnnnnnnnnnnnnnnnnnnnnnnnnnnnnnnnnnnnnnnnnnnnnnnnnnnnnnnnnnnnnnnnnnnnnnnnnnnnnnnnnnnnnnnnnnnnnnnnnnnnnnnnnnnnnnnnnnnnnnnnnnnnnnnnnnnnnnnnnnnnnnnnnnnnnnnnnnnnnnnnnnnnnnnnnnnnnnnnnnnnnnnnnnnnnnnnnnnnnnnnnnnnnnnnnnnnnnnnnnnnnnnnnnnnnnnnnnnnnnnnnnnnnnnnnnnnnnnnnnnnnnnnnnnnnnnnnnnnnnnnnnnnnnnnnnnnnnnnnnnnnnnnnnnnnnnnnnnnnnnnnnnnnnnnnnnnnnnnnnnnnnnnnnnnnnnnnnnnnnnnnnnnnnnnnnnnnnnnnnnnnnnnnnnnnnnnnnnnnnnnnnnnnnnnnnnnnnnnnnnnnnnnnnnnnnnnnnnnnnnnnnnnnnnnnnnnnnnnnnnnnnnnnnnnnnnnnnnnnnnnnnnnnnnnnnnnnnnnnnnnnnnnnnnnnnnnnnnnnnnnnnnnnnnnnnnnnnnnnnnnnnnnnnnnnnnnnnnnnnnnnnnnnnnnnnnnnnnnnnnnnnnnnnnnnnnnnnnnnnnnnnnnnnnnnnnnnnnnnnnnnnnnnnnnnnnnnnnnnnnnnnnnnnnnnnnnnnnnnnnnnnnnnnnnnnnnnnnnnnnnnnnnnnnnnnnnnnnnnnnnnnnnnnnnnnnnnnnnnnnnnnnnnnnnnnnnnnnnnnnnnnnnnnnnnnnnnnnnnnnnnnnnnnnnnnnnnnnnnnnnnnnnnnnnnnnnnnnnnnnnnnnnnnnnnnnnnnnnnnnnnnnnnnnnnnnnnnnnnnnnnnnnnnnnnnnnnnnnnnnnnnnnnnnnnnnnnnnnnnnnnnnnnnnnnnnnnnnnnnnnnnnnnnnnnnnnnnnnnnnnnnnnnnnnnnnnnnnnnnnnnnnnnnnnnnnnnnnnnnnnnnnnnnnnnnnnnnnnnnnnnnnnnnnnnnnnnnnnnnnnnnnnnnnnnnnnnnnnnnnnnnnnnnnnnnnnnnnnnnnnnnnnnnnnnnnnnnnnnnnnnnnnnnnnnnnnnnnnnnnnnnnnnnnnnnnnnnnnnnnnnnnnnnnnnnnnnnnnnnnnnnnnnnnnnnnnnnnnnnnnnnnnnnnnnnnnnnnnnnnnnnnnnnnnnnnnnnnnnnnnnnnnnnnnnnnnnnnnnnnnnnnnnnnnnnnnnnnnnnnnnnnnnnnnnnnnnnnnnnnnnnnnnnnnnnnnnnnnnnnnnnnnnnnnnnnnnnnnnnnnnnnnnnnnnnnnnnnnnnnnnnnnnnnnnnnnnnnnnnnnnnnnnnnnnnnnnnnnnnnnnnnnnnnnnnnnnnnnnnnnnnnnnnnnnnnnnnnnnnnnnnnnnnnnnnnnnnnnnnnnnnnnnnnnnnnnnnnnnnnnnnnnnnnnnnnnnnnnnnnnnnnnnnnnnnnnnnnnnnnnnnnnnnnnnnnnnnnnnnnnnnnnnnnnnnnnnnnnnnnnnnnnnnnnnnnnnnnnnnnnnnnnnnnnnnnnnnnnnnnnnnnnnnnnnnnnnnnnnnnnnnnnnnnnnnnnnnnnnnnnnnnnnnnnnnnnnnnnnnnnnnnnnnnnnnnnnnnnnnnnnnnnnnnnnnnnnnnnnnnnnnnnnnnnnnnnnnnnnnnnnnnnnnnnnnnnnnnnnnnnnnnnnnnnnnnnnnnnnnnnnnnnnnnnnnnnnnnnnnnnnnnnnnnnnnnnnnnnnnnnnnnnnnnnnnnnnnnnnnnnnnnnnnnnnnnnnnnnnnnnnnnnnnnnnnnnnnnnnnnnnnnnnnnnnnnnnnnnnnnnnnnnnnnnnnnnnnnnnnnnnnnnnnnnnnnnnnnnnnnnnnnnnnnnnnnnnnnnnnnnnnnnnnnnnnnnnnnnnnnnnnnnnnnnnnnnnnnnnnnnnnnnnnnnnnnnnnnnnnnnnnnnnnnnnnnnnnnnnnnnnnnnnnnnnnnnnnnnnnnnnnnnnnnnnnnnnnnnnnnnnnnnnnnnnnnnnnnnnnnnnnnnnnnnnnnnnnnnnnnnnnnnnnnnnnnnnnnnnnnnnnnnnnnnnnnnnnnnnnnnnnnnnnnnnnnnnnnnnnnnnnnnnnnnnnnnnnnnnnnnnnnnnnnnnnnnnnnnnnnnnnnnnnnnnnnnnnnnnnnnnnnnnnnnnnnnnnnnnnnnnnnnnnnnnnnnnnnnnnnnnnnnnnnnnnnnnnnnnnnnnnnnnnnnnnnnnnnnnnnnnnnnnnnnnnnnnnnnnnnnnnnnnnnnnnnnnnnnnnnnnnnnnnnnnnnnnnnnnnnnnnnnnnnnnnnnnnnnnnnnnnnnnnnnnnnnnnnnnnnnnnnnnnnnnnnnnnnnnnnnnnnnnnnnnnnnnnnnnnnnnnnnnnnnnnnnnnnnnnnnnnnnnnnnnnnnnnnnnnnnnnnnnnnnnnnnnnnnnnnnnnnnnnnnnnnnnnnnnnnnnnnnnnnnnnnnnnnnnnnnnnnnnnnnnnnnnnnnnnnnnnnnnnnnnnnnnnnnnnnnnnnnnnnnnnnnnnnnnnnnnnnnnnnnnnnnnnnnnnnnnnnnnnnnnnnnnnnnnnnnnnnnnnnnnnnnnnnnnnnnnnnnnnnnnnnnnnnnnnnnnnnnnnnnnnnnnnnnnnnnnnnnnnnnnnnnnnnnnnnnnnnnnnnnnnnnnnnnnnnnnnnnnnnnnnnnnnnnnnnnnnnnnnnnnnnnnnnnnnnnnnnnnnnnnnnnnnnnnnnnnnnnnnnnnnnnnnnnnnnnnnnnnnnnnnnnnnnnnnnnnnnnnnnnnnnnnnnnnnnnnnnnnnnnnnnnnnnnnnnnnnnnnnnnnnnnnnnnnnnnnnnnnnnnnnnnnnnnnnnnnnnnnnnnnnnnnnnnnnnnnnnnnnnnnnnnnnnnnnnnnnnnnnnnnnnnnnnnnnnnnnnnnnnnnnnnnnnnnnnnnnnnnnnnnnnnnnnnnnnnnnnnnnnnnnnnnnnnnnnnnnnnnnnnnnnnnnnnnnnnnnnnnnnnnnnnnnnnnnnnnnnnnnnnnnnnnnnnnnnnnnnnnnnnnnnnnnnnnnnnnnnnnnnnnnnnnnnnnnnnnnnnnnnnnnnnnnnnnnnnnnnnnnnnnnnnnnnnnnnnnnnnnnnnnnnnnnnnnnnnnnnnnnnnnnnnnnnnnnnnnnnnnnnnnnnnnnnnnnnnnnnnnnnnnnnnnnnnnnnnnnnnnnnnnnnnnnnnnnnnnnnnnnnnnnnnnnnnnnnnnnnnnnnnnnnnnnnnnnnnnnnnnnnnnnnnnnnnnnnnnnnnnnnnnnnnnnnnnnnnnnnnnnnnnnnnnnnnnnnnnnnnnnnnnnnnnnnnnnnnnnnnnnnnnnnnnnnnnnnnnnnnnnnnnnnnnnnnnnnnnnnnnnnnnnnnnnnnnnnnnnnnnnnnnnnnnnnnnnnnnnnnnnnnnnnnnnnnnnnnnnnnnnnnnnnnnnnnnnnnnnnnnnnnnnnnnnnnnnnnnnnnnnnnnnnnnnnnnnnnnnnnnnnnnnnnnnnnnnnnnnnnnnnnnnnnnnnnnnnnnnnnnnnnnnnnnnnnnnnnnnnnnnnnnnnnnnnnnnnnnnnnnnnnnnnnnnnnnnnnnnnnnnnnnnnnnnnnnnnnnnnnnnnnnnnnnnnnnnnnnnnnnnnnnnnnnnnnnnnnnnnnnnnnnnnnnnnnnnnnnnnnnnnnnnnnnnnnnnnnnnnnnnnnnnnnnnnnnnnnnnnnnnnnnnnnnnnnnnnnnnnnnnnnnnnnnnnnnnnnnnnnnnnnnnnnnnnnnnnnnnnnnnnnnnnnnnnnnnnnnnnnnnnnnnnnnnnnnnnnnnnnnnnnnnnnnnnnnnnnnnnnnnnnnnnnnnnnnnnnnnnnnnnnnnnnnnnnnnnnnnnnnnnnnnnnnnnnnnnnnnnnnnnnnnnnnnnnnnnnnnnnnnnnnnnnnnnnnnnnnnnnnnnnnnnnnnnnnnnnnnnnnnnnnnnnnnnnnnnnnnnnnnnnnnnnnnnnnnnnnnnnnnnnnnnnnnnnnnnnnnnnnnnnnnnnnnnnnnnnnnnnnnnnnnnnnnnnnnnnnnnnnnnnnnnnnnnnnnnnnnnnnnnnnnnnnnnnnnnnnnnnnnnnnnnnnnnnnnnnnnnnnnnnnnnnnnnnnnnnnnnnnnnnnnnnnnnnnnnnnnnnnnnnnnnnnnnnnnnnnnnnnnnnnnnnnnnnnnnnnnnnnnnnnnnnnnnnnnnnnnnnnnnnnnnnnnnnnnnnnnnnnnnnnnnnnnnnnnnnnnnnnnnnnnnnnnnnnnnnnnnnnnnnnnnnnnnnnnnnnnnnnnnnnnnnnnnnnnnnnnnnnnnnnnnnnnnnnnnnnnnnnnnnnnnnnnnnnnnnnnnnnnnnnnnnnnnnnnnnnnnnnnnnnnnnnnnnnnnnnnnnnnnnnnnnnnnnnnnnnnnnnnnnnnnnnnnnnnnnnnnnnnnnnnnnnnnnnnnnnnnnnnnnnnnnnnnnnnnnnnnnnnnnnnnnnnnnnnnnnnnnnnnnnnnnnnnnnnnnnnnnnnnnnnnnnnnnnnnnnnnnnnnnnnnnnnnnnnnnnnnnnnnnnnnnnnnnnnnnnnnnnnnnnnnnnnnnnnnnnnnnnnnnnnnnnnnnnnnnnnnnnnnnnnnnnnnnnnnnnnnnnnnnnnnnnnnnnnnnnnnnnnnnnnnnnnnnnnnnnnnnnnnnnnnnnnnnnnnnnnnnnnnnnnnnnnnnnnnnnnnnnnnnnnnnnnnnnnnnnnnnnnnnnnnnnnnnnnnnnnnnnnnnnnnnnnnnnnnnnnnnnnnnnnnnnnnnnnnnnnnnnnnnnnnnnnnnnnnnnnnnnnnnnnnnnnnnnnnnnnnnnnnnnnnnnnnnnnnnnnnnnnnnnnnnnnnnnnnnnnnnnnnnnnnnnnnnnnnnnnnnnnnnnnnnnnnnnnnnnnnnnnnnnnnnnnnnnnnnnnnnnnnnnnnnnnnnnnnnnnnnnnnnnnnnnnnnnnnnnnnnnnnnnnnnnnnnnnnnnnnnnnnnnnnnnnnnnnnnnnnnnnnnnnnnnnnnnnnnnnnnnnnnnnnnnnnnnnnnnnnnnnnnnnnnnnnnnnnnnnnnnnnnnnnnnnnnnnnnnnnnnnnnnnnnnnnnnnnnnnnnnnnnnnnnnnnnnnnnnnnnnnnnnnnnnnnnnnnnnnnnnnnnnnnnnnnnnnnnnnnnnnnnnnnnnnnnnnnnnnnnnnnnnnnnnnnnnnnnnnnnnnnnnnnnnnnnnnnnnnnnnnnnnnnnnnnnnnnnnnnnnnnnnnnnnnnnnnnnnnnnnnnnnnnnnnnnnnnnnnnnnnnnnnnnnnnnnnnnnnnnnnnnnnnnnnnnnnnnnnnnnnnnnnnnnnnnnnnnnnnnnnnnnnnnnnnnnnnnnnnnnnnnnnnnnnnnnnnnnnnnnnnnnnnnnnnnnnnnnnnnnnnnnnnnnnnnnnnnnnnnnnnnnnnnnnnnnnnnnnnnnnnnnnnnnnnnnnnnnnnnnnnnnnnnnnnnnnnnnnnnnnnnnnnnnnnnnnnnnnnnnnnnnnnnnnnnnnnnnnnnnnnnnnnnnnnnnnnnnnnnnnnnnnnnnnnnnnnnnnnnnnnnnnnnnnnnnnnnnnnnnnnnnnnnnnnnnnnnnnnnnnnnnnnnnnnnnnnnnnnnnnnnnnnnnnnnnnnnnnnnnnnnnnnnnnnnnnnnnnnnnnnnnnnnnnnnnnnnnnnnnnnnnnnnnnnnnnnnnnnnnnnnnnnnnnnnnnnnnnnnnnnnnnnnnnnnnnnnnnnnnnnnnnnnnnnnnnnnnnnnnnnnnnnnnnnnnnnnnnnnnnnnnnnnnnnnnnnnnnnnnnnnnnnnnnnnnnnnnnnnnnnnnnnnnnnnnnnnnnnnnnnnnnnnnnnnnnnnnnnnnnnnnnnnnnnnnnnnnnnnnnnnnnnnnnnnnnnnnnnnnnnnnnnnnnnnnnnnnnnnnnnnnnnnnnnnnnnnnnnnnnnnnnnnnnnnnnnnnnnnnnnnnnnnnnnnnnnnnnnnnnnnnnnnnnnnnnnnnnnnnnnnnnnnnnnnnnnnnnnnnnnnnnnnnnnnnnnnnnnnnnnnnnnnnnnnnnnnnnnnnnnnnnnnnnnnnnnnnnnnnnnnnnnnnnnnnnnnnnnnnnnnnnnnnnnnnnnnnnnnnnnnnnnnnnnnnnnnnnnnnnnnnnnnnnnnnnnnnnnnnnnnnnnnnnnnnnnnnnnnnnnnnnnnnnnnnnnnnnnnnnnnnnnnnnnnnnnnnnnnnnnnnnnnnnnnnnnnnnnnnnnnnnnnnnnnnnnnnnnnnnnnnnnnnnnnnnnnnnnnnnnnnnnnnnnnnnnnnnnnnnnnnnnnnnnnnnnnnnnnnnnnnnnnnnnnnnnnnnnnnnnnnnnnnnnnnnnnnnnnnnnnnnnnnnnnnnnnnnnnnnnnnnnnnnnnnnnnnnnnnnnnnnnnnnnnnnnnnnnnnnnnnnnnnnnnnnnnnnnnnnnnnnnnnnnnnnnnnnnnnnnnnnnnnnnnnnnnnnnnnnnnnnnnnnnnnnnnnnnnnnnnnnnnnnnnnnnnnnnnnnnnnnnnnnnnnnnnnnnnnnnnnnnnnnnnnnnnnnnnnnnnnnnnnnnnnnnnnnnnnnnnnnnnnnnnnnnnnnnnnnnnnnnnnnnnnnnnnnnnnnnnnnnnnnnnnnnnnnnnnnnnnnnnnnnnnnnnnnnnnnnnnnnnnnnnnnnnnnnnnnnnnnnnnnnnnnnnnnnnnnnnnnnnnnnnnnnnnnnnnnnnnnnnnnnnnnnnnnnnnnnnnnnnnnnnnnnnnnnnnnnnnnnnnnnnnnnnnnnnnnnnnnnnnnnnnnnnnnnnnnnnnnnnnnnnnnnnnnnnnnnnnnnnnnnnnnnnnnnnnnnnnnnnnnnnnnnnnnnnnnnnnnnnnnnnnnnnnnnnnnnnnnnnnnnnnnnnnnnnnnnnnnnnnnnnnnnnnnnnnnnnnnnnnnnnnnnnnnnnnnnnnnnnnnnnnnnnnnnnnnnnnnnnnnnnnnnnnnnnnnnnnnnnnnnnnnnnnnnnnnnnnnnnnnnnnnnnnnnnnnnnnnnnnnnnnnnnnnnnnnnnnnnnnnnnnnnnnnnnnnnnnnnnnnnnnnnnnnnnnnnnnnnnnnnnnnnnnnnnnnnnnnnnnnnnnnnnnnnnnnnnnnnnnnnnnnnnnnnnnnnnnnnnnnnnnnnnnnnnnnnnnnnnnnnnnnnnnnnnnnnnnnnnnnnnnnnnnnnnnnnnnnnnnnnnnnnnnnnnnnnnnnnnnnnnnnnnnnnnnnnnnnnnnnnnnnnnnnnnnnnnnnnnnnnnnnnnnnnnnnnnnnnnnnnnnnnnnnnnnnnnnnnnnnnnnnnnnnnnnnnnnnnnnnnnnnnnnnnnnnnnnnnnnnnnnnnnnnnnnnnnnnnnnnnnnnnnnnnnnnnnnnnnnnnnnnnnnnnnnnnnnnnnnnnnnnnnnnnnnnnnnnnnnnnnnnnnnnnnnnnnnnnnnnnnnnnnnnnnnnnnnnnnnnnnnnnnnnnnnnnnnnnnnnnnnnnnnnnnnnnnnnnnnnnnnnnnnnnnnnnnnnnnnnnnnnnnnnnnnnnnnnnnnnnnnnnnnnnnnnnnnnnnnnnnnnnnnnnnnnnnnnnnnnnnnnnnnnnnnnnnnnnnnnnnnnnnnnnnnnnnnnnnnnnnnnnnnnnnnnnnnnnnnnnnnnnnnnnnnnnnnnnnnnnnnnnnnnnnnnnnnnnnnnnnnnnnnnnnnnnnnnnnnnnnnnnnnnnnnnnnnnnnnnnnnnnnnnnnnnnnnnnnnnnnnnnnnnnnnnnnnnnnnnnnnnnnnnnnnnnnnnnnnnnnnnnnnnnnnnnnnnnnnnnnnnnnnnnnnnnnnnnnnnnnnnnnnnnnnnnnnnnnnnnnnnnnnnnnnnnnnnnnnnnnnnnnnnnnnnnnnnnnnnnnnnnnnnnnnnnnnnnnnnnnnnnnnnnnnnnnnnnnnnnnnnnnnnnnnnnnnnnnnnnnnnnnnnnnnnnnnnnnnnnnnnnnnnnnnnnnnnnnnnnnnnnnnnnnnnnnnnnnnnnnnnnnnnnnnnnnnnnnnnnnnnnnnnnnnnnnnnnnnnnnnnnnnnnnnnnnnnnnnnnnnnnnnnnnnnnnnnnnnnnnnnnnnnnnnnnnnnnnnnnnnnnnnnnnnnnnnnnnnnnnnnnnnnnnnnnnnnnnnnnnnnnnnnnnnnnnnnnnnnnnnnnnnnnnnnnnnnnnnnnnnnnnnnnnnnnnnnnnnnnnnnnnnnnnnnnnnnnnnnnnnnnnnnnnnnnnnnnnnnnnnnnnnnnnnnnnnnnnnnnnnnnnnnnnnnnnnnnnnnnnnnnnnnnnnnnnnnnnnnnnnnnnnnnnnnnnnnnnnnnnnnnnnnnnnnnnnnnnnnnnnnnnnnnnnnnnnnnnnnnnnnnnnnnnnnnnnnnnnnnnnnnnnnnnnnnnnnnnnnnnnnnnnnnnnnnnnnnnnnnnnnnnnnnnnnnnnnnnnnnnnnnnnnnnnnnnnnnnnnnnnnnnnnnnnnnnnnnnnnnnnnnnnnnnnnnnnnnnnnnnnnnnnnnnnnnnnnnnnnnnnnnnnnnnnnnnnnnnnnnnnnnnnnnnnnnnnnnnnnnnnnnnnnnnnnnnnnnnnnnnnnnnnnnnnnnnnnnnnnnnnnnnnnnnnnnnnnnnnnnnnnnnnnnnnnnnnnnnnnnnnnnnnnnnnnnnnnnnnnnnnnnnnnnnnnnnnnnnnnnnnnnnnnnnnnnnnnnnnnnnnnnnnnnnnnnnnnnnnnnnnnnnnnnnnnnnnnnnnnnnnnnnnnnnnnnnnnnnnnnnnnnnnnnnnnnnnnnnnnnnnnnnnnnnnnnnnnnnnnnnnnnnnnnnnnnnnnnnnnnnnnnnnnnnnnnnnnnnnnnnnnnnnnnnnnnnnnnnnnnnnnnnnnnnnnnnnnnnnnnnnnnnnnnnnnnnnnnnnnnnnnnnnnnnnnnnnnnnnnnnnnnnnnnnnnnnnnnnnnnnnnnnnnnnnnnnnnnnnnnnnnnnnnnnnnnnnnnnnnnnnnnnnnnnnnnnnnnnnnnnnnnnnnnnnnnnnnnnnnnnnnnnnnnnnnnnnnnnnnnnnnnnnnnnnnnnnnnnnnnnnnnnnnnnnnnnnnnnnnnnnnnnnnnnnnnnnnnnnnnnnnnnnnnnnnnnnnnnnnnnnnnnnnnnnnnnnnnnnnnnnnnnnnnnnnnnnnnnnnnnnnnnnnnnnnnnnnnnnnnnnnnnnnnnnnnnnnnnnnnnnnnnnnnnnnnnnnnnnnnnnnnnnnnnnnnnnnnnnnnnnnnnnnnnnnnnnnnnnnnnnnnnnnnnnnnnnnnnnnnnnnnnnnnnnnnnnnnnnnnnnnnnnnnnnnnnnnnnnnnnnnnnnnnnnnnnnnnnnnnnnnnnnnnnnnnnnnnnnnnnnnnnnnnnnnnnnnnnnnnnnnnnnnnnnnnnnnnnnnnnnnnnnnnnnnnnnnnnnnnnnnnnnnnnnnnnnnnnnnnnnnnnnnnnnnnnnnnnnnnnnnnnnnnnnnnnnnnnnnnnnnnnnnnnnnnnnnnnnnnnnnnnnnnnnnnnnnnnnnnnnnnnnnnnnnnnnnnnnnnnnnnnnnnnnnnnnnnnnnnnnnnnnnnnnnnnnnnnnnnnnnnnnnnnnnnnnnnnnnnnnnnnnnnnnnnnnnnnnnnnnnnnnnnnnnnnnnnnnnnnnnnnnnnnnnnnnnnnnnnnnnnnnnnnnnnnnnnnnnnnnnnnnnnnnnnnnnnnnnnnnnnnnnnnnnnnnnnnnnnnnnnnnnnnnnnnnnnnnnnnnnnnnnnnnnnnnnnnnnnnnnnnnnnnnnnnnnnnnnnnnnnnnnnnnnnnnnnnnnnnnnnnnnnnnnnnnnnnnnnnnnnnnnnnnnnnnnnnnnnnnnnnnnnnnnnnnnnnnnnnnnnnnnnnnnnnnnnnnnnnnnnnnnnnnnnnnnnnnnnnnnnnnnnnnnnnnnnnnnnnnnnnnnnnnnnnnnnnnnnnnnnnnnnnnnnnnnnnnnnnnnnnnnnnnnnnnnnnnnnnnnnnnnnnnnnnnnnnnnnnnnnnnnnnnnnnnnnnnnnnnnnnnnnnnnnnnnnnnnnnnnnnnnnnnnnnnnnnnnnnnnnnnnnnnnnnnnnnnnnnnnnnnnnnnnnnnnnnnnnnnnnnnnnnnnnnnnnnnnnnnnnnnnnnnnnnnnnnnnnnnnnnnnnnnnnnnnnnnnnnnnnnnnnnnnnnnnnnnnnnnnnnnnnnnnnnnnnnnnnnnnnnnnnnnnnnnnnnnnnnnnnnnnnnnnnnnnnnnnnnnnnnnnnnnnnnnnnnnnnnnnnnnnnnnnnnnnnnnnnnnnnnnnnnnnnnnnnnnnnnnnnnnnnnnnnnnnnnnnnnnnnnnnnnnnnnnnnnnnnnnnnnnnnnnnnnnnnnnnnnnnnnnnnnnnnnnnnnnnnnnnnnnnnnnnnnnnnnnnnnnnnnnnnnnnnnnnnnnnnnnnnnnnnnnnnnnnnnnnnnnnnnnnnnnnnnnnnnnnnnnnnnnnnnnnnnnnnnnnnnnnnnnnnnnnnnnnnnnnnnnnnnnnnnnnnnnnnnnnnnnnnnnnnnnnnnnnnnnnnnnnnnnnnnnnnnnnnnnnnnnnnnnnnnnnnnnnnnnnnnnnnnnnnnnnnnnnnnnnnnnnnnnnnnnnnnnnnnnnnnnnnnnnnnnnnnnnnnnnnnnnnnnnnnnnnnnnnnnnnnnnnnnnnnnnnnnnnnnnnnnnnnnnnnnnnnnnnnnnnnnnnnnnnnnnnnnnnnnnnnnnnnnnnnnnnnnnnnnnnnnnnnnnnnnnnnnnnnnnnnnnnnnnnnnnnnnnnnnnnnnnnnnnnnnnnnnnnnnnnnnnnnnnnnnnnnnnnnnnnnnnnnnnnnnnnnnnnnnnnnnnnnnnnnnnnnnnnnnnnnnnnnnnnnnnnnnnnnnnnnnnnnnnnnnnnnnnnnnnnnnnnnnnnnnnnnnnnnnnnnnnnnnnnnnnnnnnnnnnnnnnnnnnnnnnnnnnnnnnnnnnnnnnnnnnnnnnnnnnnnnnnnnnnnnnnnnnnnnnnnnnnnnnnnnnnnnnnnnnnnnnnnnnnnnnnnnnnnnnnnnnnnnnnnnnnnnnnnnnnnnnnnnnnnnnnnnnnnnnnnnnnnnnnnnnnnnnnnnnnnnnnnnnnnnnnnnnnnnnnnnnnnnnnnnnnnnnnnnnnnnnnnnnnnnnnnnnnnnnnnnnnnnnnnnnnnnnnnnnnnnnnnnnnnnnnnnnnnnnnnnnnnnnnnnnnnnnnnnnnnnnnnnnnnnnnnnnnnnnnnnnnnnnnnnnnnnnnnnnnnnnnnnnnnnnnnnnnnnnnnnnnnnnnnnnnnnnnnnnnnnnnnnnnnnnnnnnnnnnnnnnnnnnnnnnnnnnnnnnnnnnnnnnnnnnnnnnnnnnnnnnnnnnnnnnnnnnnnnnnnnnnnnnnnnnnnnnnnnnnnnnnnnnnnnnnnnnnnnnnnnnnnnnnnnnnnnnnnnnnnnnnnnnnnnnnnnnnnnnnnnnnnnnnnnnnnnnnnnnnnnnnnnnnnnnnnnnnnnnnnnnnnnnnnnnnnnnnnnnnnnnnnnnnnnnnnnnnnnnnnnnnnnnnnnnnnnnnnnnnnnnnnnnnnnnnnnnnnnnnnnnnnnnnnnnnnnnnnnnnnnnnnnnnnnnnnnnnnnnnnnnnnnnnnnnnnnnnnnnnnnnnnnnnnnnnnnnnnnnnnnnnnnnnnnnnnnnnnnnnnnnnnnnnnnnnnnnnnnnnnnnnnnnnnnnnnnnnnnnnnnnnnnnnnnnnnnnnnnnnnnnnnnnnnnnnnnnnnnnnnnnnnnnnnnnnnnnnnnnnnnnnnnnnnnnnnnnnnnnnnnnnnnnnnnnnnnnnnnnnnnnnnnnnnnnnnnnnnnnnnnnnnnnnnnnnnnnnnnnnnnnnnnnnnnnnnnnnnnnnnnnnnnnnnnnnnnnnnnnnnnnnnnnnnnnnnnnnnnnnnnnnnnnnnnnnnnnnnnnnnnnnnnnnnnnnnnnnnnnnnnnnnnnnnnnnnnnnnnnnnnnnnnnnnnnnnnnnnnnnnnnnnnnnnnnnnnnnnnnnnnnnnnnnnnnnnnnnnnnnnnnnnnnnnnnnnnnnnnnnnnnnnnnnnnnnnnnnnnnnnnnnnnnnnnnnnnnnnnnnnnnnnnnnnnnnnnnnnnnnnnnnnnnnnnnnnnnnnnnnnnnnnnnnnnnnnnnnnnnnnnnnnnnnnnnnnnnnnnnnnnnnnnnnnnnnnnnnnnnnnnnnnnnnnnnnnnnnnnnnnnnnnnnnnnnnnnnnnnnnnnnnnnnnnnnnnnnnnnnnnnnnnnnnnnnnnnnnnnnnnnnnnnnnnnnnnnnnnnnnnnnnnnnnnnnnnnnnnnnnnnnnnnnnnnnnnnnnnnnnnnnnnnnnnnnnnnnnnnnnnnnnnnnnnnnnnnnnnnnnnnnnnnnnnnnnnnnnnnnnnnnnnnnnnnnnnnnnnnnnnnnnnnnnnnnnnnnnnnnnnnnnnnnnnnnnnnnnnnnnnnnnnnnnnnnnnnnnnnnnnnnnnnnnnnnnnnnnnnnnnnnnnnnnnnnnnnnnnnnnnnnnnnnnnnnnnnnnnnnnnnnnnnnnnnnnnnnnnnnnnnnnnnnnnnnnnnnnnnnnnnnnnnnnnnnnnnnnnnnnnnnnnnnnnnnnnnnnnnnnnnnnnnnnnnnnnnnnnnnnnnnnnnnnnnnnnnnnnnnnnnnnnnnnnnnnnnnnnnnnnnnnnnnnnnnnnnnnnnnnnnnnnnnnnnnnnnnnnnnnnnnnnnnnnnnnnnnnnnnnnnnnnnnnnnnnnnnnnnnnnnnnnnnnnnnnnnnnnnnnnnnnnnnnnnnnnnnnnnnnnnnnnnnnnnnnnnnnnnnnnnnnnnnnnnnnnnnnnnnnnnnnnnnnnnnnnnnnnnnnnnnnnnnnnnnnnnnnnnnnnnnnnnnnnnnnnnnnnnnnnnnnnnnnnnnnnnnnnnnnnnnnnnnnnnnnnnnnnnnnnnnnnnnnnnnnnnnnnnnnnnnnnnnnnnnnnnnnnnnnnnnnnnnnnnnnnnnnnnnnnnnnnnnnnnnnnnnnnnnnnnnnnnnnnnnnnnnnnnnnnnnnnnnnnnnnnnnnnnnnnnnnnnnnnnnnnnnnnnnnnnnnnnnnnnnnnnnnnnnnnnnnnnnnnnnnnnnnnnnnnnnnnnnnnnnnnnnnnnnnnnnnnnnnnnnnnnnnnnnnnnnnnnnnnnnnnnnnnnnnnnnnnnnnnnnnnnnnnnnnnnnnnnnnnnnnnnnnnnnnnnnnnnnnnnnnnnnnnnnnnnnnnnnnnnnnnnnnnnnnnnnnnnnnnnnnnnnnnnnnnnnnnnnnnnnnnnnnnnnnnnnnnnnnnnnnnnnnnnnnnnnnnnnnnnnnnnnnnnnnnnnnnnnnnnnnnnnnnnnnnnnnnnnnnnnnnnnnnnnnnnnnnnnnnnnnnnnnnnnnnnnnnnnnnnnnnnnnnnnnnnnnnnnnnnnnnnnnnnnnnnnnnnnnnnnnnnnnnnnnnnnnnnnnnnnnnnnnnnnnnnnnnnnnnnnnnnnnnnnnnnnnnnnnnnnnnnnnnnnnnnnnnnnnnnnnnnnnnnnnnnnnnnnnnnnnnnnnnnnnnnnnnnnnnnnnnnnnnnnnnnnnnnnnnnnnnnnnnnnnnnnnnnnnnnnnnnnnnnnnnnnnnnnnnnnnnnnnnnnnnnnnnnnnnnnnnnnnnnnnnnnnnnnnnnnnnnnnnnnnnnnnnnnnnnnnnnnnnnnnnnnnnnnnnnnnnnnnnnnnnnnnnnnnnnnnnnnnnnnnnnnnnnnnnnnnnnnnnnnnnnnnnnnnnnnnnnnnnnnnnnnnnnnnnnnnnnnnnnnnnnnnnnnnnnnnnnnnnnnnnnnnnnnnnnnnnnnnnnnnnnnnnnnnnnnnnnnnnnnnnnnnnnnnnnnnnnnnnnnnnnnnnnnnnnnnnnnnnnnnnnnnnnnnnnnnnnnnnnnnnnnnnnnnnnnnnnnnnnnnnnnnnnnnnnnnnnnnnnnnnnnnnnnnnnnnnnnnnnnnnnnnnnnnnnnnnnnnnnnnnnnnnnnnnnnnnnnnnnnnnnnnnnnnnnnnnnnnnnnnnnnnnnnnnnnnnnnnnnnnnnnnnnnnnnnnnnnnnnnnnnnnnnnnnnnnnnnnnnnnnnnnnnnnnnnnnnnnnnnnnnnnnnnnnnnnnnnnnnnnnnnnnnnnnnnnnnnnnnnnnnnnnnnnnnnnnnnnnnnnnnnnnnnnnnnnnnnnnnnnnnnnnnnnnnnnnnnnnnnnnnnnnnnnnnnnnnnnnnnnnnnnnnnnnnnnnnnnnnnnnnnnnnnnnnnnnnnnnnnnnnnnnnnnnnnnnnnnnnnnnnnnnnnnnnnnnnnnnnnnnnnnnnnnnnnnnnnnnnnnnnnnnnnnnnnnnnnnnnnnnnnnnnnnnnnnnnnnnnnnnnnnnnnnnnnnnnnnnnnnnnnnnnnnnnnnnnnnnnnnnnnnnnnnnnnnnnnnnnnnnnnnnnnnnnnnnnnnnnnnnnnnnnnnnnnnnnnnnnnnnnnnnnnnnnnnnnnnnnnnnnnnnnnnnnnnnnnnnnnnnnnnnnnnnnnnnnnnnnnnnnnnnnnnnnnnnnnnnnnnnnnnnnnnnnnnnnnnnnnnnnnnnnnnnnnnnnnnnnnnnnnnnnnnnnnnnnnnnnnnnnnnnnnnnnnnnnnnnnnnnnnnnnnnnnnnnnnnnnnnnnnnnnnnnnnnnnnnnnnnnnnnnnnnnnnnnnnnnnnnnnnnnnnnnnnnnnnnnnnnnnnnnnnnnnnnnnnnnnnnnnnnnnnnnnnnnnnnnnnnnnnnnnnnnnnnnnnnnnnnnnnnnnnnnnnnnnnnnnnnnnnnnnnnnnnnnnnnnnnnnnnnnnnnnnnnnnnnnnnnnnnnnnnnnnnnnnnnnnnnnnnnnnnnnnnnnnnnnnnnnnnnnnnnnnnnnnnnnnnnnnnnnnnnnnnnnnnnnnnnnnnnnnnnnnnnnnnnnnnnnnnnnnnnnnnnnnnnnnnnnnnnnnnnnnnnnnnnnnnnnnnnnnnnnnnnnnnnnnnnnnnnnnnnnnnnnnnnnnnnnnnnnnnnnnnnnnnnnnnnnnnnnnnnnnnnnnnnnnnnnnnnnnnnnnnnnnnnnnnnnnnnnnnnnnnnnnnnnnnnnnnnnnnnnnnnnnnnnnnnnnnnnnnnnnnnnnnnnnnnnnnnnnnnnnnnnnnnnnnnnnnnnnnnnnnnnnnnnnnnnnnnnnnnnnnnnnnnnnnnnnnnnnnnnnnnnnnnnnnnnnnnnnnnnnnnnnnnnnnnnnnnnnnnnnnnnnnnnnnnnnnnnnnnnnnnnnnnnnnnnnnnnnnnnnnnnnnnnnnnnnnnnnnnnnnnnnnnnnnnnnnnnnnnnnnnnnnnnnnnnnnnnnnnnnnnnnnnnnnnnnnnnnnnnnnnnnnnnnnnnnnnnnnnnnnnnnnnnnnnnnnnnnnnnnnnnnnnnnnnnnnnnnnnnnnnnnnnnnnnnnnnnnnnnnnnnnnnnnnnnnnnnnnnnnnnnnnnnnnnnnnnnnnnnnnnnnnnnnnnnnnnnnnnnnnnnnnnnnnnnnnnnnnnnnnnnnnnnnnnnnnnnnnnnnnnnnnnnnnnnnnnnnnnnnnnnnnnnnnnnnnnnnnnnnnnnnnnnnnnnnnnnnnnnnnnnnnnnnnnnnnnnnnnnnnnnnnnnnnnnnnnnnnnnnnnnnnnnnnnnnnnnnnnnnnnnnnnnnnnnnnnnnnnnnnnnnnnnnnnnnnnnnnnnnnnnnnnnnnnnnnnnnnnnnnnnnnnnnnnnnnnnnnnnnnnnnnnnnnnnnnnnnnnnnnnnnnnnnnnnnnnnnnnnnnnnnnnnnnnnnnnnnnnnnnnnnnnnnnnnnnnnnnnnnnnnnnnnnnnnnnnnnnnnnnnnnnnnnnnnnnnnnnnnnnnnnnnnnnnnnnnnnnnnnnnnnnnnnnnnnnnnnnnnnnnnnnnnnnnnnnnnnnnnnnnnnnnnnnnnnnnnnnnnnnnnnnnnnnnnnnnnnnnnnnnnnnnnnnnnnnnnnnnnnnnnnnnnnnnnnnnnnnnnnnnnnnnnnnnnnnnnnnnnnnnnnnnnnnnnnnnnnnnnnnnnnnnnnnnnnnnnnnnnnnnnnnnnnnnnnnnnnnnnnnnnnnnnnnnnnnnnnnnnnnnnnnnnnnnnnnnnnnnnnnnnnnnnnnnnnnnnnnnnnnnnnnnnnnnnnnnnnnnnnnnnnnnnnnnnnnnnnnnnnnnnnnnnnnnnnnnnnnnnnnnnnnnnnnnnnnnnnnnnnnnnnnnnnnnnnnnnnnnnnnnnnnnnnnnnnnnnnnnnnnnnnnnnnnnnnnnnnnnnnnnnnnnnnnnnnnnnnnnnnnnnnnnnnnnnnnnnnnnnnnnnnnnnnnnnnnnnnnnnnnnnnnnnnnnnnnnnnnnnnnnnnnnnnnnnnnnnnnnnnnnnnnnnnnnnnnnnnnnnnnnnnnnnnnnnnnnnnnnnnnnnnnnnnnnnnnnnnnnnnnnnnnnnnnnnnnnnnnnnnnnnnnnnnnnnnnnnnnnnnnnnnnnnnnnnnnnnnnnnnnnnnnnnnnnnnnnnnnnnnnnnnnnnnnnnnnnnnnnnnnnnnnnnnnnnnnnnnnnnnnnnnnnnnnnnnnnnnnnnnnnnnnnnnnnnnnnnnnnnnnnnnnnnnnnnnnnnnnnnnnnnnnnnnnnnnnnnnnnnnnnnnnnnnnnnnnnnnnnnnnnnnnnnnnnnnnnnnnnnnnnnnnnnnnnnnnnnnnnnnnnnnnnnnnnnnnnnnnnnnnnnnnnnnnnnnnnnnnnnnnnnnnnnnnnnnnnnnnnnnnnnnnnnnnnnnnnnnnnnnnnnnnnnnnnnnnnnnnnnnnnnnnnnnnnnnnnnnnnnnnnnnnnnnnnnnnnnnnnnnnnnnnnnnnnnnnnnnnnnnnnnnnnnnnnnnnnnnnnnnnnnnnnnnnnnnnnnnnnnnnnnnnnnnnnnnnnnnnnnnnnnnnnnnnnnnnnnnnnnnnnnnnnnnnnnnnnnnnnnnnnnnnnnnnnnnnnnnnnnnnnnnnnnnnnnnnnnnnnnnnnnnnnnnnnnnnnnnnnnnnnnnnnnnnnnnnnnnnnnnnnnnnnnnnnnnnnnnnnnnnnnnnnnnnnnnnnnnnnnnnnnnnnnnnnnnnnnnnnnnnnnnnnnnnnnnnnnnnnnnnnnnnnnnnnnnnnnnnnnnnnnnnnnnnnnnnnnnnnnnnnnnnnnnnnnnnnnnnnnnnnnnnnnnnnnnnnnnnnnnnnnnnnnnnnnnnnnnnnnnnnnnnnnnnnnnnnnnnnnnnnnnnnnnnnnnnnnnnnnnnnnnnnnnnnnnnnnnnnnnnnnnnnnnnnnnnnnnnnnnnnnnnnnnnnnnnnnnnnnnnnnnnnnnnnnnnnnnnnnnnnnnnnnnnnnnnnnnnnnnnnnnnnnnnnnnnnnnnnnnnnnnnnnnnnnnnnnnnnnnnnnnnnnnnnnnnnnnnnnnnnnnnnnnnnnnnnnnnnnnnnnnnnnnnnnnnnnnnnnnnnnnnnnnnnnnnnnnnnnnnnnnnnnnnnnnnnnnnnnnnnnnnnnnnnnnnnnnnnnnnnnnnnnnnnnnnnnnnnnnnnnnnnnnnnnnnnnnnnnnnnnnnnnnnnnnnnnnnnnnnnnnnnnnnnnnnnnnnnnnnnnnnnnnnnnnnnnnnnnnnnnnnnnnnnnnnnnnnnnnnnnnnnnnnnnnnnnnnnnnnnnnnnnnnnnnnnnnnnnnnnnnnnnnnnnnnnnnnnnnnnnnnnnnnnnnnnnnnnnnnnnnnnnnnnnnnnnnnnnnnnnnnnnnnnnnnnnnnnnnnnnnnnnnnnnnnnnnnnnnnnnnnnnnnnnnnnnnnnnnnnnnnnnnnnnnnnnnnnnnnnnnnnnnnnnnnnnnnnnnnnnnnnnnnnnnnnnnnnnnnnnnnnnnnnnnnnnnnnnnnnnnnnnnnnnnnnnnnnnnnnnnnnnnnnnnnnnnnnnnnnnnnnnnnnnnnnnnnnnnnnnnnnnnnnnnnnnnnnnnnnnnnnnnnnnnnnnnnnnnnnnnnnnnnnnnnnnnnnnnnnnnnnnnnnnnnnnnnnnnnnnnnnnnnnnnnnnnnnnnnnnnnnnnnnnnnnnnnnnnnnnnnnnnnnnnnnnnnnnnnnnnnnnnnnnnnnnnnnnnnnnnnnnnnnnnnnnnnnnnnnnnnnnnnnnnnnnnnnnnnnnnnnnnnnnnnnnnnnnnnnnnnnnnnnnnnnnnnnnnnnnnnnnnnnnnnnnnnnnnnnnnnnnnnnnnnnnnnnnnnnnnnnnnnnnnnnnnnnnnnnnnnnnnnnnnnnnnnnnnnnnnnnnnnnnnnnnnnnnnnnnnnnnnnnnnnnnnnnnnnnnnnnnnnnnnnnnnnnnnnnnnnnnnnnnnnnnnnnnnnnnnnnnnnnnnnnnnnnnnnnnnnnnnnnnnnnnnnnnnnnnnnnnnnnnnnnnnnnnnnnnnnnnnnnnnnnnnnnnnnnnnnnnnnnnnnnnnnnnnnnnnnnnnnnnnnnnnnnnnnnnnnnnnnnnnnnnnnnnnnnnnnnnnnnnnnnnnnnnnnnnnnnnnnnnnnnnnnnnnnnnnnnnnnnnnnnnnnnnnnnnnnnnnnnnnnnnnnnnnnnnnnnnnnnnnnnnnnnnnnnnnnnnnnnnnnnnnnnnnnnnnnnnnnnnnnnnnnnnnnnnnnnnnnnnnnnnnnnnnnnnnnnnnnnnnnnnnnnnnnnnnnnnnnnnnnnnnnnnnnnnnnnnnnnnnnnnnnnnnnnnnnnnnnnnnnnnnnnnnnnnnnnnnnnnnnnnnnnnnnnnnnnnnnnnnnnnnnnnnnnnnnnnnnnnnnnnnnnnnnnnnnnnnnnnnnnnnnnnnnnnnnnnnnnnnnnnnnnnnnnnnnnnnnnnnnnnnnnnnnnnnnnnnnnnnnnnnnnnnnnnnnnnnnnnnnnnnnnnnnnnnnnnnnnnnnnnnnnnnnnnnnnnnnnnnnnnnnnnnnnnnnnnnnnnnnnnnnnnnnnnnnnnnnnnnnnnnnnnnnnnnnnnnnnnnnnnnnnnnnnnnnnnnnnnnnnnnnnnnnnnnnnnnnnnnnnnnnnnnnnnnnnnnnnnnnnnnnnnnnnnnnnnnnnnnnnnnnnnnnnnnnnnnnnnnnnnnnnnnnnnnnnnnnnnnnnnnnnnnnnnnnnnnnnnnnnnnnnnnnnnnnnnnnnnnnnnnnnnnnnnnnnnnnnnnnnnnnnnnnnnnnnnnnnnnnnnnnnnnnnnnnnnnnnnnnnnnnnnnnnnnnnnnnnnnnnnnnnnnnnnnnnnnnnnnnnnnnnnnnnnnnnnnnnnnnnnnnnnnnnnnnnnnnnnnnnnnnnnnnnnnnnnnnnnnnnnnnnnnnnnnnnnnnnnnnnnnnnnnnnnnnnnnnnnnnnnnnnnnnnnnnnnnnnnnnnnnnnnnnnnnnnnnnnnnnnnnnnnnnnnnnnnnnnnnnnnnnnnnnnnnnnnnnnnnnnnnnnnnnnnnnnnnnnnnnnnnnnnnnnnnnnnnnnnnnnnnnnnnnnnnnnnnnnnnnnnnnnnnnnnnnnnnnnnnnnnnnnnnnnnnnnnnnnnnnnnnnnnnnnnnnnnnnnnnnnnnnnnnnnnnnnnnnnnnnnnnnnnnnnnnnnnnnnnnnnnnnnnnnnnnnnnnnnnnnnnnnnnnnnnnnnnnnnnnnnnnnnnnnnnnnnnnnnnnnnnnnnnnnnnnnnnnnnnnnnnnnnnnnnnnnnnnnnnnnnnnnnnnnnnnnnnnnnnnnnnnnnnnnnnnnnnnnnnnnnnnnnnnnnnnnnnnnnnnnnnnnnnnnnnnnnnnnnnnnnnnnnnnnnnnnnnnnnnnnnnnnnnnnnnnnnnnnnnnnnnnnnnnnnnnnnnnnnnnnnnnnnnnnnnnnnnnnnnnnnnnnnnnnnnnnnnnnnnnnnnnnnnnnnnnnnnnnnnnnnnnnnnnnnnnnnnnnnnnnnnnnnnnnnnnnnnnnnnnnnnnnnnnnnnnnnnnnnnnnnnnnnnnnnnnnnnnnnnnnnnnnnnnnnnnnnnnnnnnnnnnnnnnnnnnnnnnnnnnnnnnnnnnnnnnnnnnnnnnnnnnnnnnnnnnnnnnnnnnnnnnnnnnnnnnnnnnnnnnnnnnnnnnnnnnnnnnnnnnnnnnnnnnnnnnnnnnnnnnnnnnnnnnnnnnnnnnnnnnnnnnnnnnnnnnnnnnnnnnnnnnnnnnnnnnnnnnnnnnnnnnnnnnnnnnnnnnnnnnnnnnnnnnnnnnnnnnnnnnnnnnnnnnnnnnnnnnnnnnnnnnnnnnnnnnnnnnnnnnnnnnnnnnnnnnnnnnnnnnnnnnnnnnnnnnnnnnnnnnnnnnnnnnnnnnnnnnnnnnnnnnnnnnnnnnnnnnnnnnnnnnnnnnnnnnnnnnnnnnnnnnnnnnnnnnnnnnnnnnnnnnnnnnnnnnnnnnnnnnnnnnnnnnnnnnnnnnnnnnnnnnnnnnnnnnnnnnnnnnnnnnnnnnnnnnnnnnnnnnnnnnnnnnnnnnnnnnnnnnnnnnnnnnnnnnnnnnnnnnnnnnnnnnnnnnnnnnnnnnnnnnnnnnnnnnnnnnnnnnnnnnnnnnnnnnnnnnnnnnnnnnnnnnnnnnnnnnnnnnnnnnnnnnnnnnnnnnnnnnnnnnnnnnnnnnnnnnnnnnnnnnnnnnnnnnnnnnnnnnnnnnnnnnnnnnnnnnnnnnnnnnnnnnnnnnnnnnnnnnnnnnnnnnnnnnnnnnnnnnnnnnnnnnnnnnnnnnnnnnnnnnnnnnnnnnnnnnnnnnnnnnnnnnnnnnnnnnnnnnnnnnnnnnnnnnnnnnnnnnnnnnnnnnnnnnnnnnnnnnnnnnnnnnnnnnnnnnnnnnnnnnnnnnnnnnnnnnnnnnnnnnnnnnnnnnnnnnnnnnnnnnnnnnnnnnnnnnnnnnnnnnnnnnnnnnnnnnnnnnnnnnnnnnnnnnnnnnnnnnnnnnnnnnnnnnnnnnnnnnnnnnnnnnnnnnnnnnnnnnnnnnnnnnnnnnnnnnnnnnnnnnnnnnnnnnnnnnnnnnnnnnnnnnnnnnnnnnnnnnnnnnnnnnnnnnnnnnnnnnnnnnnnnnnnnnnnnnnnnnnnnnnnnnnnnnnnnnnnnnnnnnnnnnnnnnnnnnnnnnnnnnnnnnnnnnnnnnnnnnnnnnnnnnnnnnnnnnnnnnnnnnnnnnnnnnnnnnnnnnnnnnnnnnnnnnnnnnnnnnnnnnnnnnnnnnnnnnnnnnnnnnnnnnnnnnnnnnnnnnnnnnnnnnnnnnnnnnnnnnnnnnnnnnnnnnnnnnnnnnnnnnnnnnnnnnnnnnnnnnnnnnnnnnnnnnnnnnnnnnnnnnnnnnnnnnnnnnnnnnnnnnnnnnnnnnnnnnnnnnnnnnnnnnnnnnnnnnnnnnnnnnnnnnnnnnnnnnnnnnnnnnnnnnnnnnnnnnnnnnnnnnnnnnnnnnnnnnnnnnnnnnnnnnnnnnnnnnnnnnnnnnnnnnnnnnnnnnnnnnnnnnnnnnnnnnnnnnnnnnnnnnnnnnnnnnnnnnnnnnnnnnnnnnnnnnnnnnnnnnnnnnnnnnnnnnnnnnnnnnnnnnnnnnnnnnnnnnnnnnnnnnnnnnnnnnnnnnnnnnnnnnnnnnnnnnnnnnnnnnnnnnnnnnnnnnnnnnnnnnnnnnnnnnnnnnnnnnnnnnnnnnnnnnnnnnnnnnnnnnnnnnnnnnnnnnnnnnnnnnnnnnnnnnnnnnnnnnnnnnnnnnnnnnnnnnnnnnnnnnnnnnnnnnnnnnnnnnnnnnnnnnnnnnnnnnnnnnnnnnnnnnnnnnnnnnnnnnnnnnnnnnnnnnnnnnnnnnnnnnnnnnnnnnnnnnnnnnnnnnnnnnnnnnnnnnnnnnnnnnnnnnnnnnnnnnnnnnnnnnnnnnnnnnnnnnnnnnnnnnnnnnnnnnnnnnnnnnnnnnnnnnnnnnnnnnnnnnnnnnnnnnnnnnnnnnnnnnnnnnnnnnnnnnnnnnnnnnnnnnnnnnnnnnnnnnnnnnnnnnnnnnnnnnnnnnnnnnnnnnnnnnnnnnnnnnnnnnnnnnnnnnnnnnnnnnnnnnnnnnnnnnnnnnnnnnnnnnnnnnnnnnnnnnnnnnnnnnnnnnnnnnnnnnnnnnnnnnnnnnnnnnnnnnnnnnnnnnnnnnnnnnnnnnnnnnnnnnnnnnnnnnnnnnnnnnnnnnnnnnnnnnnnnnnnnnnnnnnnnnnnnnnnnnnnnnnnnnnnnnnnnnnnnnnnnnnnnnnnnnnnnnnnnnnnnnnnnnnnnnnnnnnnnnnnnnnnnnnnnnnnnnnnnnnnnnnnnnnnnnnnnnnnnnnnnnnnnnnnnnnnnnnnnnnnnnnnnnnnnnnnnnnnnnnnnnnnnnnnnnnnnnnnnnnnnnnnnnnnnnnnnnnnnnnnnnnnnnnnnnnnnnnnnnnnnnnnnnnnnnnnnnnnnnnnnnnnnnnnnnnnnnnnnnnnnnnnnnnnnnnnnnnnnnnnnnnnnnnnnnnnnnnnnnnnnnnnnnnnnnnnnnnnnnnnnnnnnnnnnnnnnnnnnnnnnnnnnnnnnnnnnnnnnnnnnnnnnnnnnnnnnnnnnnnnnnnnnnnnnnnnnnnnnnnnnnnnnnnnnnnnnnnnnnnnnnnnnnnnnnnnnnnnnnnnnnnnnnnnnnnnnnnnnnnnnnnnnnnnnnnnnnnnnnnnnnnnnnnnnnnnnnnnnnnnnnnnnnnnnnnnnnnnnnnnnnnnnnnnnnnnnnnnnnnnnnnnnnnnnnnnnnnnnnnnnnnnnnnnnnnnnnnnnnnnnnnnnnnnnnnnnnnnnnnnnnnnnnnnnnnnnnnnnnnnnnnnnnnnnnnnnnnnnnnnnnnnnnnnnnnnnnnnnnnnnnnnnnnnnnnnnnnnnnnnnnnnnnnnnnnnnnnnnnnnnnnnnnnnnnnnnnnnnnnnnnnnnnnnnnnnnnnnnnnnnnnnnnnnnnnnnnnnnnnnnnnnnnnnnnnnnnnnnnnnnnnnnnnnnnnnnnnnnnnnnnnnnnnnnnnnnnnnnnnnnnnnnnnnnnnnnnnnnnnnnnnnnnnnnnnnnnnnnnnnnnnnnnnnnnnnnnnnnnnnnnnnnnnnnnnnnnnnnnnnnnnnnnnnnnnnnnnnnnnnnnnnnnnnnnnnnnnnnnnnnnnnnnnnnnnnnnnnnnnnnnnnnnnnnnnnnnnnnnnnnnnnnnnnnnnnnnnnnnnnnnnnnnnnnnnnnnnnnnnnnnnnnnnnnnnnnnnnnnnnnnnnnnnnnnnnnnnnnnnnnnnnnnnnnnnnnnnnnnnnnnnnnnnnnnnnnnnnnnnnnnnnnnnnnnnnnnnnnnnnnnnnnnnnnnnnnnnnnnnnnnnnnnnnnnnnnnnnnnnnnnnnnnnnnnnnnnnnnnnnnnnnnnnnnnnnnnnnnnnnnnnnnnnnnnnnnnnnnnnnnnnnnnnnnnnnnnnnnnnnnnnnnnnnnnnnnnnnnnnnnnnnnnnnnnnnnnnnnnnnnnnnnnnnnnnnnnnnnnnnnnnnnnnnnnnnnnnnnnnnnnnnnnnnnnnnnnnnnnnnnnnnnnnnnnnnnnnnnnnnnnnnnnnnnnnnnnnnnnnnnnnnnnnnnnnnnnnnnnnnnnnnnnnnnnnnnnnnnnnnnnnnnnnnnnnnnnnnnnnnnnnnnnnnnnnnnnnnnnnnnnnnnnnnnnnnnnnnnnnnnnnnnnnnnnnnnnnnnnnnnnnnnnnnnnnnnnnnnnnnnnnnnnnnnnnnnnnnnnnnnnnnnnnnnnnnnnnnnnnnnnnnnnnnnnnnnnnnnnnnnnnnnnnnnnnnnnnnnnnnnnnnnnnnnnnnnnnnnnnnnnnnnnnnnnnnnnnnnnnnnnnnnnnnnnnnnnnnnnnnnnnnnnnnnnnnnnnnnnnnnnnnnnnnnnnnnnnnnnnnnnnnnnnnnnnnnnnnnnnnnnnnnnnnnnnnnnnnnnnnnnnnnnnnnnnnnnnnnnnnnnnnnnnnnnnnnnnnnnnnnnnnnnnnnnnnnnnnnnnnnnnnnnnnnnnnnnnnnnnnnnnnnnnnnnnnnnnnnnnnnnnnnnnnnnnnnnnnnnnnnnnnnnnnnnnnnnnnnnnnnnnnnnnnnnnnnnnnnnnnnnnnnnnnnnnnnnnnnnnnnnnnnnnnnnnnnnnnnnnnnnnnnnnnnnnnnnnnnnnnnnnnnnnnnnnnnnnnnnnnnnnnnnnnnnnnnnnnnnnnnnnnnnnnnnnnnnnnnnnnnnnnnnnnnnnnnnnnnnnnnnnnnnnnnnnnnnnnnnnnnnnnnnnnnnnnnnnnnnnnnnnnnnnnnnnnnnnnnnnnnnnnnnnnnnnnnnnnnnnnnnnnnnnnnnnnnnnnnnnnnnnnnnnnnnnnnnnnnnnnnnnnnnnnnnnnnnnnnnnnnnnnnnnnnnnnnnnnnnnnnnnnnnnnnnnnnnnnnnnnnnnnnnnnnnnnnnnnnnnnnnnnnnnnnnnnnnnnnnnnnnnnnnnnnnnnnnnnnnnnnnnnnnnnnnnnnnnnnnnnnnnnnnnnnnnnnnnnnnnnnnnnnnnnnnnnnnnnnnnnnnnnnnnnnnnnnnnnnnnnnnnnnnnnnnnnnnnnnnnnnnnnnnnnnnnnnnnnnnnnnnnnnnnnnnnnnnnnnnnnnnnnnnnnnnnnnnnnnnnnnnnnnnnnnnnnnnnnnnnnnnnnnnnnnnnnnnnnnnnnnnnnnnnnnnnnnnnnnnnnnnnnnnnnnnnnnnnnnnnnnnnnnnnnnnnnnnnnnnnnnnnnnnnnnnnnnnnnnnnnnnnnnnnnnnnnnnnnnnnnnnnnnnnnnnnnnnnnnnnnnnnnnnnnnnnnnnnnnnnnnnnnnnnnnnnnnnnnnnnnnnnnnnnnnnnnnnnnnnnnnnnnnnnnnnnnnnnnnnnnnnnnnnnnnnnnnnnnnnnnnnnnnnnnnnnnnnnnnnnnnnnnnnnnnnnnnnnnnnnnnnnnnnnnnnnnnnnnnnnnnnnnnnnnnnnnnnnnnnnnnnnnnnnnnnnnnnnnnnnnnnnnnnnnnnnnnnnnnnnnnnnnnnnnnnnnnnnnnnnnnnnnnnnnnnnnnnnnnnnnnnnnnnnnnnnnnnnnnnnnnnnnnnnnnnnnnnnnnnnnnnnnnnnnnnnnnnnnnnnnnnnnnnnnnnnnnnnnnnnnnnnnnnnnnnnnnnnnnnnnnnnnnnnnnnnnnnnnnnnnnnnnnnnnnnnnnnnnnnnnnnnnnnnnnnnnnnnnnnnnnnnnnnnnnnnnnnnnnnnnnnnnnnnnnnnnnnnnnnnnnnnnnnnnnnnnnnnnnnnnnnnnnnnnnnnnnnnnnnnnnnnnnnnnnnnnnnnnnnnnnnnnnnnnnnnnnnnnnnnnnnnnnnnnnnnnnnnnnnnnnnnnnnnnnnnnnnnnnnnnnnnnnnnnnnnnnnnnnnnnnnnnnnnnnnnnnnnnnnnnnnnnnnnnnnnnnnnnnnnnnnnnnnnnnnnnnnnnnnnnnnnnnnnnnnnnnnnnnnnnnnnnnnnnnnnnnnnnnnnnnnnnnnnnnnnnnnnnnnnnnnnnnnnnnnnnnnnnnnnnnnnnnnnnnnnnnnnnnnnnnnnnnnnnnnnnnnnnnnnnnnnnnnnnnnnnnnnnnnnnnnnnnnnnnnnnnnnnnnnnnnnnnnnnnnnnnnnnnnnnnnnnnnnnnnnnnnnnnnnnnnnnnnnnnnnnnnnnnnnnnnnnnnnnnnnnnnnnnnnnnnnnnnnnnnnnnnnnnnnnnnnnnnnnnnnnnnnnnnnnnnnnnnnnnnnnnnnnnnnnnnnnnnnnnnnnnnnnnnnnnnnnnnnnnnnnnnnnnnnnnnnnnnnnnnnnnnnnnnnnnnnnnnnnnnnnnnnnnnnnnnnnnnnnnnnnnnnnnnnnnnnnnnnnnnnnnnnnnnnnnnnnnnnnnnnnnnnnnnnnnnnnnnnnnnnnnnnnnnnnnnnnnnnnnnnnnnnnnnnnnnnnnnnnnnnnnnnnnnnnnnnnnnnnnnnnnnnnnnnnnnnnnnnnnnnnnnnnnnnnnnnnnnnnnnnnnnnnnnnnnnnnnnnnnnnnnnnnnnnnnnnnnnnnnnnnnnnnnnnnnnnnnnnnnnnnnnnnnnnnnnnnnnnnnnnnnnnnnnnnnnnnnnnnnnnnnnnnnnnnnnnnnnnnnnnnnnnnnnnnnnnnnnnnnnnnnnnnnnnnnnnnnnnnnnnnnnnnnnnnnnnnnnnnnnnnnnnnnnnnnnnnnnnnnnnnnnnnnnnnnnnnnnnnnnnnnnnnnnnnnnnnnnnnnnnnnnnnnnnnnnnnnnnnnnnnnnnnnnnnnnnnnnnnnnnnnnnnnnnnnnnnnnnnnnnnnnnnnnnnnnnnnnnnnnnnnnnnnnnnnnnnnnnnnnnnnnnnnnnnnnnnnnnnnnnnnnnnnnnnnnnnnnnnnnnnnnnnnnnnnnnnnnnnnnnnnnnnnnnnnnnnnnnnnnnnnnnnnnnnnnnnnnnnnnnnnnnnnnnnnnnnnnnnnnnnnnnnnnnnnnnnnnnnnnnnnnnnnnnnnnnnnnnnnnnnnnnnnnnnnnnnnnnnnnnnnnnnnnnnnnnnnnnnnnnnnnnnnnnnnnnnnnnnnnnnnnnnnnnnnnnnnnnnnnnnnnnnnnnnnnnnnnnnnnnnnnnnnnnnnnnnnnnnnnnnnnnnnnnnnnnnnnnnnnnnnnnnnnnnnnnnnnnnnnnnnnnnnnnnnnnnnnnnnnnnnnnnnnnnnnnnnnnnnnnnnnnnnnnnnnnnnnnnnnnnnnnnnnnnnnnnnnnnnnnnnnnnnnnnnnnnnnnnnnnnnnnnnnnnnnnnnnnnnnnnnnnnnnnnnnnnnnnnnnnnnnnnnnnnnnnnnnnnnnnnnnnnnnnnnnnnnnnnnnnnnnnnnnnnnnnnnnnnnnnnnnnnnnnnnnnnnnnnnnnnnnnnnnnnnnnnnnnnnnnnnnnnnnnnnnnnnnnnnnnnnnnnnnnnnnnnnnnnnnnnnnnnnnnnnnnnnnnnnnnnnnnnnnnnnnnnnnnnnnnnnnnnnnnnnnnnnnnnnnnnnnnnnnnnnnnnnnnnnnnnnnnnnnnnnnnnnnnnnnnnnnnnnnnnnnnnnnnnnnnnnnnnnnnnnnnnnnnnnnnnnnnnnnnnnnnnnnnnnnnnnnnnnnnnnnnnnnnnnnnnnnnnnnnnnnnnnnnnnnnnnnnnnnnnnnnnnnnnnnnnnnnnnnnnnnnnnnnnnnnnnnnnnnnnnnnnnnnnnnnnnnnnnnnnnnnnnnnnnnnnnnnnnnnnnnnnnnnnnnnnnnnnnnnnnnnnnnnnnnnnnnnnnnnnnnnnnnnnnnnnnnnnnnnnnnnnnnnnnnnnnnnnnnnnnnnnnnnnnnnnnnnnnnnnnnnnnnnnnnnnnnnnnnnnnnnnnnnnnnnnnnnnnnnnnnnnnnnnnnnnnnnnnnnnnnnnnnnnnnnnnnnnnnnnnnnnnnnnnnnnnnnnnnnnnnnnnnnnnnnnnnnnnnnnnnnnnnnnnnnnnnnnnnnnnnnnnnnnnnnnnnnnnnnnnnnnnnnnnnnnnnnnnnnnnnnnnnnnnnnnnnnnnnnnnnnnnnnnnnnnnnnnnnnnnnnnnnnnnnnnnnnnnnnnnnnnnnnnnnnnnnnnnnnnnnnnnnnnnnnnnnnnnnnnnnnnnnnnnnnnnnnnnnnnnnnnnnnnnnnnnnnnnnnnnnnnnnnnnnnnnnnnnnnnnnnnnnnnnnnnnnnnnnnnnnnnnnnnnnnnnnnnnnnnnnnnnnnnnnnnnnnnnnnnnnnnnnnnnnnnnnnnnnnnnnnnnnnnnnnnnnnnnnnnnnnnnnnnnnnnnnnnnnnnnnnnnnnnnnnnnnnnnnnnnnnnnnnnnnnnnnnnnnnnnnnnnnnnnnnnnnnnnnnnnnnnnnnnnnnnnnnnnnnnnnnnnnnnnnnnnnnnnnnnnnnnnnnnnnnnnnnnnnnnnnnnnnnnnnnnnnnnnnnnnnnnnnnnnnnnnnnnnnnnnnnnnnnnnnnnnnnnnnnnnnnnnnnnnnnnnnnnnnnnnnnnnnnnnnnnnnnnnnnnnnnnnnnnnnnnnnnnnnnnnnnnnnnnnnnnnnnnnnnnnnnnnnnnnnnnnnnnnnnnnnnnnnnnnnnnnnnnnnnnnnnnnnnnnnnnnnnnnnnnnnnnnnnnnnnnnnnnnnnnnnnnnnnnnnnnnnnnnnnnnnnnnnnnnnnnnnnnnnnnnnnnnnnnnnnnnnnnnnnnnnnnnnnnnnnnnnnnnnnnnnnnnnnnnnnnnnnnnnnnnnnnnnnnnnnnnnnnnnnnnnnnnnnnnnnnnnnnnnnnnnnnnnnnnnnnnnnnnnnnnnnnnnnnnnnnnnnnnnnnnnnnnnnnnnnnnnnnnnnnnnnnnnnnnnnnnnnnnnnnnnnnnnnnnnnnnnnnnnnnnnnnnnnnnnnnnnnnnnnnnnnnnnnnnnnnnnnnnnnnnnnnnnnnnnnnnnnnnnnnnnnnnnnnnnnnnnnnnnnnnnnnnnnnnnnnnnnnnnnnnnnnnnnnnnnnnnnnnnnnnnnnnnnnnnnnnnnnnnnnnnnnnnnnnnnnnnnnnnnnnnnnnnnnnnnnnnnnnnnnnnnnnnnnnnnnnnnnnnnnnnnnnnnnnnnnnnnnnnnnnnnnnnnnnnnnnnnnnnnnnnnnnnnnnnnnnnnnnnnnnnnnnnnnnnnnnnnnnnnnnnnnnnnnnnnnnnnnnnnnnnnnnnnnnnnnnnnnnnnnnnnnnnnnnnnnnnnnnnnnnnnnnnnnnnnnnnnnnnnnnnnnnnnnnnnnnnnnnnnnnnnnnnnnnnnnnnnnnnnnnnnnnnnnnnnnnnnnnnnnnnnnnnnnnnnnnnnnnnnnnnnnnnnnnnnnnnnnnnnnnnnnnnnnnnnnnnnnnnnnnnnnnnnnnnnnnnnnnnnnnnnnnnnnnnnnnnnnnnnnnnnnnnnnnnnnnnnnnnnnnnnnnnnnnnnnnnnnnnnnnnnnnnnnnnnnnnnnnnnnnnnnnnnnnnnnnnnnnnnnnnnnnnnnnnnnnnnnnnnnnnnnnnnnnnnnnnnnnnnnnnnnnnnnnnnnnnnnnnnnnnnnnnnnnnnnnnnnnnnnnnnnnnnnnnnnnnnnnnnnnnnnnnnnnnnnnnnnnnnnnnnnnnnnnnnnnnnnnnnnnnnnnnnnnnnnnnnnnnnnnnnnnnnnnnnnnnnnnnnnnnnnnnnnnnnnnnnnnnnnnnnnnnnnnnnnnnnnnnnnnnnnnnnnnnnnnnnnnnnnnnnnnnnnnnnnnnnnnnnnnnnnnnnnnnnnnnnnnnnnnnnnnnnnnnnnnnnnnnnnnnnnnnnnnnnnnnnnnnnnnnnnnnnnnnnnnnnnnnnnnnnnnnnnnnnnnnnnnnnnnnnnnnnnnnnnnnnnnnnnnnnnnnnnnnnnnnnnnnnnnnnnnnnnnnnnnnnnnnnnnnnnnnnnnnnnnnnnnnnnnnnnnnnnnnnnnnnnnnnnnnnnnnnnnnnnnnnnnnnnnnnnnnnnnnnnnnnnnnnnnnnnnnnnnnnnnnnnnnnnnnnnnnnnnnnnnnnnnnnnnnnnnnnnnnnnnnnnnnnnnnnnnnnnnnnnnnnnnnnnnnnnnnnnnnnnnnnnnnnnnnnnnnnnnnnnnnnnnnnnnnnnnnnnnnnnnnnnnnnnnnnnnnnnnnnnnnnnnnnnnnnnnnnnnnnnnnnnnnnnnnnnnnnnnnnnnnnnnnnnnnnnnnnnnnnnnnnnnnnnnnnnnnnnnnnnnnnnnnnnnnnnnnnnnnnnnnnnnnnnnnnnnnnnnnnnnnnnnnnnnnnnnnnnnnnnnnnnnnnnnnnnnnnnnnnnnnnnnnnnnnnnnnnnnnnnnnnnnnnnnnnnnnnnnnnnnnnnnnnnnnnnnnnnnnnnnnnnnnnnnnnnnnnnnnnnnnnnnnnnnnnnnnnnnnnnnnnnnnnnnnnnnnnnnnnnnnnnnnnnnnnnnnnnnnnnnnnnnnnnnnnnnnnnnnnnnnnnnnnnnnnnnnnnnnnnnnnnnnnnnnnnnnnnnnnnnnnnnnnnnnnnnnnnnnnnnnnnnnnnnnnnnnnnnnnnnnnnnnnnnnnnnnnnnnnnnnnnnnnnnnnnnnnnnnnnnnnnnnnnnnnnnnnnnnnnnnnnnnnnnnnnnnnnnnnnnnnnnnnnnnnnnnnnnnnnnnnnnnnnnnnnnnnnnnnnnnnnnnnnnnnnnnnnnnnnnnnnnnnnnnnnnnnnnnnnnnnnnnnnnnnnnnnnnnnnnnnnnnnnnnnnnnnnnnnnnnnnnnnnnnnnnnnnnnnnnnnnnnnnnnnnnnnnnnnnnnnnnnnnnnnnnnnnnnnnnnnnnnnnnnnnnnnnnnnnnnnnnnnnnnnnnnnnnnnnnnnnnnnnnnnnnnnnnnnnnnnnnnnnnnnnnnnnnnnnnnnnnnnnnnnnnnnnnnnnnnnnnnnnnnnnnnnnnnnnnnnnnnnnnnnnnnnnnnnnnnnnnnnnnnnnnnnnnnnnnnnnnnnnnnnnnnnnnnnnnnnnnnnnnnnnnnnnnnnnnnnnnnnnnnnnnnnnnnnnnnnnnnnnnnnnnnnnnnnnnnnnnnnnnnnnnnnnnnnnnnnnnnnnnnnnnnnnnnnnnnnnnnnnnnnnnnnnnnnnnnnnnnnnnnnnnnnnnnnnnnnnnnnnnnnnnnnnnnnnnnnnnnnnnnnnnnnnnnnnnnnnnnnnnnnnnnnnnnnnnnnnnnnnnnnnnnnnnnnnnnnnnnnnnnnnnnnnnnnnnnnnnnnnnnnnnnnnnnnnnnnnnnnnnnnnnnnnnnnnnnnnnnnnnnnnnnnnnnnnnnnnnnnnnnnnnnnnnnnnnnnnnnnnnnnnnnnnnnnnnnnnnnnnnnnnnnnnnnnnnnnnnnnnnnnnnnnnnnnnnnnnnnnnnnnnnnnnnnnnnnnnnnnnnnnnnnnnnnnnnnnnnnnnnnnnnnnnnnnnnnnnnnnnnnnnnnnnnnnnnnnnnnnnnnnnnnnnnnnnnnnnnnnnnnnnnnnnnnnnnnnnnnnnnnnnnnnnnnnnnnnnnnnnnnnnnnnnnnnnnnnnnnnnnnnnnnnnnnnnnnnnnnnnnnnnnnnnnnnnnnnnnnnnnnnnnnnnnnnnnnnnnnnnnnnnnnnnnnnnnnnnnnnnnnnnnnnnnnnnnnnnnnnnnnnnnnnnnnnnnnnnnnnnnnnnnnnnnnnnnnnnnnnnnnnnnnnnnnnnnnnnnnnnnnnnnnnnnnnnnnnnnnnnnnnnnnnnnnnnnnnnnnnnnnnnnnnnnnnnnnnnnnnnnnnnnnnnnnnnnnnnnnnnnnnnnnnnnnnnnnnnnnnnnnnnnnnnnnnnnnnnnnnnnnnnnnnnnnnnnnnnnnnnnnnnnnnnnnnnnnnnnnnnnnnnnnnnnnnnnnnnnnnnnnnnnnnnnnnnnnnnnnnnnnnnnnnnnnnnnnnnnnnnnnnnnnnnnnnnnnnnnnnnnnnnnnnnnnnnnnnnnnnnnnnnnnnnnnnnnnnnnnnnnnnnnnnnnnnnnnnnnnnnnnnnnnnnnnnnnnnnnnnnnnnnnnnnnnnnnnnnnnnnnnnnnnnnnnnnnnnnnnnnnnnnnnnnnnnnnnnnnnnnnnnnnnnnnnnnnnnnnnnnnnnnnnnnnnnnnnnnnnnnnnnnnnnnnnnnnnnnnnnnnnnnnnnnnnnnnnnnnnnnnnnnnnnnnnnnnnnnnnnnnnnnnnnnnnnnnnnnnnnnnnnnnnnnnnnnnnnnnnnnnnnnnnnnnnnnnnnnnnnnnnnnnnnnnnnnnnnnnnnnnnnnnnnnnnnnnnnnnnnnnnnnnnnnnnnnnnnnnnnnnnnnnnnnnnnnnnnnnnnnnnnnnnnnnnnnnnnnnnnnnnnnnnnnnnnnnnnnnnnnnnnnnnnnnnnnnnnnnnnnnnnnnnnnnnnnnnnnnnnnnnnnnnnnnnnnnnnnnnnnnnnnnnnnnnnnnnnnnnnnnnnnnnnnnnnnnnnnnnnnnnnnnnnnnnnnnnnnnnnnnnnnnnnnnnnnnnnnnnnnnnnnnnnnnnnnnnnnnnnnnnnnnnnnnnnnnnnnnnnnnnnnnnnnnnnnnnnnnnnnnnnnnnnnnnnnnnnnnnnnnnnnnnnnnnnnnnnnnnnnnnnnnnnnnnnnnnnnnnnnnnnnnnnnnnnnnnnnnnnnnnnnnnnnnnnnnnnnnnnnnnnnnnnnnnnnnnnnnnnnnnnnnnnnnnnnnnnnnnnnnnnnnnnnnnnnnnnnnnnnnnnnnnnnnnnnnnnnnnnnnnnnnnnnnnnnnnnnnnnnnnnnnnnnnnnnnnnnnnnnnnnnnnnnnnnnnnnnnnnnnnnnnnnnnnnnnnnnnnnnnnnnnnnnnnnnnnnnnnnnnnnnnnnnnnnnnnnnnnnnnnnnnnnnnnnnnnnnnnnnnnnnnnnnnnnnnnnnnnnnnnnnnnnnnnnnnnnnnnnnnnnnnnnnnnnnnnnnnnnnnnnnnnnnnnnnnnnnnnnnnnnnnnnnnnnnnnnnnnnnnnnnnnnnnnnnnnnnnnnnnnnnnnnnnnnnnnnnnnnnnnnnnnnnnnnnnnnnnnnnnnnnnnnnnnnnnnnnnnnnnnnnnnnnnnnnnnnnnnnnnnnnnnnnnnnnnnnnnnnnnnnnnnnnnnnnnnnnnnnnnnnnnnnnnnnnnnnnnnnnnnnnnnnnnnnnnnnnnnnnnnnnnnnnnnnnnnnnnnnnnnnnnnnnnnnnnnnnnnnnnnnnnnnnnnnnnnnnnnnnnnnnnnnnnnnnnnnnnnnnnnnnnnnnnnnnnnnnnnnnnnnnnnnnnnnnnnnnnnnnnnnnnnnnnnnnnnnnnnnnnnnnnnnnnnnnnnnnnnnnnnnnnnnnnnnnnnnnnnnnnnnnnnnnnnnnnnnnnnnnnnnnnnnnnnnnnnnnnnnnnnnnnnnnnnnnnnnnnnnnnnnnnnnnnnnnnnnnnnnnnnnnnnnnnnnnnnnnnnnnnnnnnnnnnnnnnnnnnnnnnnnnnnnnnnnnnnnnnnnnnnnnnnnnnnnnnnnnnnnnnnnnnnnnnnnnnnnnnnnnnnnnnnnnnnnnnnnnnnnnnnnnnnnnnnnnnnnnnnnnnnnnnnnnnnnnnnnnnnnnnnnnnnnnnnnnnnnnnnnnnnnnnnnnnnnnnnnnnnnnnnnnnnnnnnnnnnnnnnnnnnnnnnnnnnnnnnnnnnnnnnnnnnnnnnnnnnnnnnnnnnnnnnnnnnnnnnnnnnnnnnnnnnnnnnnnnnnnnnnnnnnnnnnnnnnnnnnnnnnnnnnnnnnnnnnnnnnnnnnnnnnnnnnnnnnnnnnnnnnnnnnnnnnnnnnnnnnnnnnnnnnnnnnnnnnnnnnnnnnnnnnnnnnnnnnnnnnnnnnnnnnnnnnnnnnnnnnnnnnnnnnnnnnnnnnnnnnnnnnnnnnnnnnnnnnnnnnnnnnnnnnnnnnnnnnnnnnnnnnnnnnnnnnnnnnnnnnnnnnnnnnnnnnnnnnnnnnnnnnnnnnnnnnnnnnnnnnnnnnnnnnnnnnnnnnnnnnnnnnnnnnnnnnnnnnnnnnnnnnnnnnnnnnnnnnnnnnnnnnnnnnnnnnnnnnnnnnnnnnnnnnnnnnnnnnnnnnnnnnnnnnnnnnnnnnnnnnnnnnnnnnnnnnnnnnnnnnnnnnnnnnnnnnnnnnnnnnnnnnnnnnnnnnnnnnnnnnnnnnnnnnnnnnnnnnnnnnnnnnnnnnnnnnnnnnnnnnnnnnnnnnnnnnnnnnnnnnnnnnnnnnnnnnnnnnnnnnnnnnnnnnnnnnnnnnnnnnnnnnnnnnnnnnnnnnnnnnnnnnnnnnnnnnnnnnnnnnnnnnnnnnnnnnnnnnnnnnnnnnnnnnnnnnnnnnnnnnnnnnnnnnnnnnnnnnnnnnnnnnnnnnnnnnnnnnnnnnnnnnnnnnnnnnnnnnnnnnnnnnnnnnnnnnnnnnnnnnnnnnnnnnnnnnnnnnnnnnnnnnnnnnnnnnnnnnnnnnnnnnnnnnnnnnnnnnnnnnnnnnnnnnnnnnnnnnnnnnnnnnnnnnnnnnnnnnnnnnnnnnnnnnnnnnnnnnnnnnnnnnnnnnnnnnnnnnnnnnnnnnnnnnnnnnnnnnnnnnnnnnnnnnnnnnnnnnnnnnnnnnnnnnnnnnnnnnnnnnnnnnnnnnnnnnnnnnnnnnnnnnnnnnnnnnnnnnnnnnnnnnnnnnnnnnnnnnnnnnnnnnnnnnnnnnnnnnnnnnnnnnnnnnnnnnnnnnnnnnnnnnnnnnnnnnnnnnnnnnnnnnnnnnnnnnnnnnnnnnnnnnnnnnnnnnnnnnnnnnnnnnnnnnnnnnnnnnnnnnnnnnnnnnnnnnnnnnnnnnnnnnnnnnnnnnnnnnnnnnnnnnnnnnnnnnnnnnnnnnnnnnnnnnnnnnnnnnnnnnnnnnnnnnnnnnnnnnnnnnnnnnnnnnnnnnnnnnnnnnnnnnnnnnnnnnnnnnnnnnnnnnnnnnnnnnnnnnnnnnnnnnnnnnnnnnnnnnnnnnnnnnnnnnnnnnnnnnnnnnnnnnnnnnnnnnnnnnnnnnnnnnnnnnnnnnnnnnnnnnnnnnnnnnnnnnnnnnnnnnnnnnnnnnnnnnnnnnnnnnnnnnnnnnnnnnnnnnnnnnnnnnnnnnnnnnnnnnnnnnnnnnnnnnnnnnnnnnnnnnnnnnnnnnnnnnnnnnnnnnnnnnnnnnnnnnnnnnnnnnnnnnnnnnnnnnnnnnnnnnnnnnnnnnnnnnnnnnnnnnnnnnnnnnnnnnnnnnnnnnnnnnnnnnnnnnnnnnnnnnnnnnnnnnnnnnnnnnnnnnnnnnnnnnnnnnnnnnnnnnnnnnnnnnnnnnnnnnnnnnnnnnnnnnnnnnnnnnnnnnnnnnnnnnnnnnnnnnnnnnnnnnnnnnnnnnnnnnnnnnnnnnnnnnnnnnnnnnnnnnnnnnnnnnnnnnnnnnnnnnnnnnnnnnnnnnnnnnnnnnnnnnnnnnnnnnnnnnnnnnnnnnnnnnnnnnnnnnnnnnnnnnnnnnnnnnnnnnnnnnnnnnnnnnnnnnnnnnnnnnnnnnnnnnnnnnnnnnnnnnnnnnnnnnnnnnnnnnnnnnnnnnnnnnnnnnnnnnnnnnnnnnnnnnnnnnnnnnnnnnnnnnnnnnnnnnnnnnnnnnnnnnnnnnnnnnnnnnnnnnnnnnnnnnnnnnnnnnnnnnnnnnnnnnnnnnnnnnnnnnnnnnnnnnnnnnnnnnnnnnnnnnnnnnnnnnnnnnnnnnnnnnnnnnnnnnnnnnnnnnnnnnnnnnnnnnnnnnnnnnnnnnnnnnnnnnnnnnnnnnnnnnnnnnnnnnnnnnnnnnnnnnnnnnnnnnnnnnnnnnnnnnnnnnnnnnnnnnnnnnnnnnnnnnnnnnnnnnnnnnnnnnnnnnnnnnnnnnnnnnnnnnnnnnnnnnnnnnnnnnnnnnnnnnnnnnnnnnnnnnnnnnnnnnnnnnnnnnnnnnnnnnnnnnnnnnnnnnnnnnnnnnnnnnnnnnnnnnnnnnnnnnnnnnnnnnnnnnnnnnnnnnnnnnnnnnnnnnnnnnnnnnnnnnnnnnnnnnnnnnnnnnnnnnnnnnnnnnnnnnnnnnnnnnnnnnnnnnnnnnnnnnnnnnnnnnnnnnnnnnnnnnnnnnnnnnnnnnnnnnnnnnnnnnnnnnnnnnnnnnnnnnnnnnnnnnnnnnnnnnnnnnnnnnnnnnnnnnnnnnnnnnnnnnnnnnnnnnnnnnnnnnnnnnnnnnnnnnnnnnnnnnnnnnnnnnnnnnnnnnnnnnnnnnnnnnnnnnnnnnnnnnnnnnnnnnnnnnnnnnnnnnnnnnnnnnnnnnnnnnnnnnnnnnnnnnnnnnnnnnnnnnnnnnnnnnnnnnnnnnnnnnnnnnnnnnnnnnnnnnnnnnnnnnnnnnnnnnnnnnnnnnnnnnnnnnnnnnnnnnnnnnnnnnnnnnnnnnnnnnnnnnnnnnnnnnnnnnnnnnnnnnnnnnnnnnnnnnnnnnnnnnnnnnnnnnnnnnnnnnnnnnnnnnnnnnnnnnnnnnnnnnnnnnnnnnnnnnnnnnnnnnnnnnnnnnnnnnnnnnnnnnnnnnnnnnnnnnnnnnnnnnnnnnnnnnnnnnnnnnnnnnnnnnnnnnnnnnnnnnnnnnnnnnnnnnnnnnnnnnnnnnnnnnnnnnnnnnnnnnnnnnnnnnnnnnnnnnnnnnnnnnnnnnnnnnnnnnnnnnnnnnnnnnnnnnnnnnnnnnnnnnnnnnnnnnnnnnnnnnnnnnnnnnnnnnnnnnnnnnnnnnnnnnnnnnnnnnnnnnnnnnnnnnnnnnnnnnnnnnnnnnnnnnnnnnnnnnnnnnnnnnnnnnnnnnnnnnnnnnnnnnnnnnnnnnnnnnnnnnnnnnnnnnnnnnnnnnnnnnnnnnnnnnnnnnnnnnnnnnnnnnnnnnnnnnnnnnnnnnnnnnnnnnnnnnnnnnnnnnnnnnnnnnnnnnnnnnnnnnnnnnnnnnnnnnnnnnnnnnnnnnnnnnnnnnnnnnnnnnnnnnnnnnnnnnnnnnnnnnnnnnnnnnnnnnnnnnnnnnnnnnnnnnnnnnnnnnnnnnnnnnnnnnnnnnnnnnnnnnnnnnnnnnnnnnnnnnnnnnnnnnnnnnnnnnnnnnnnnnnnnnnnnnnnnnnnnnnnnnnnnnnnnnnnnnnnnnnnnnnnnnnnnnnnnnnnnnnnnnnnnnnnnnnnnnnnnnnnnnnnnnnnnnnnnnnnnnnnnnnnnnnnnnnnnnnnnnnnnnnnnnnnnnnnnnnnnnnnnnnnnnnnnnnnnnnnnnnnnnnnnnnnnnnnnnnnnnnnnnnnnnnnnnnnnnnnnnnnnnnnnnnnnnnnnnnnnnnnnnnnnnnnnnnnnnnnnnnnnnnnnnnnnnnnnnnnnnnnnnnnnnnnnnnnnnnnnnnnnnnnnnnnnnnnnnnnnnnnnnnnnnnnnnnnnnnnnnnnnnnnnnnnnnnnnnnnnnnnnnnnnnnnnnnnnnnnnnnnnnnnnnnnnnnnnnnnnnnnnnnnnnnnnnnnnnnnnnnnnnnnnnnnnnnnnnnnnnnnnnnnnnnnnnnnnnnnnnnnnnnnnnnnnnnnnnnnnnnnnnnnnnnnnnnnnnnnnnnnnnnnnnnnnnnnnnnnnnnnnnnnnnnnnnnnnnnnnnnnnnnnnnnnnnnnnnnnnnnnnnnnnnnnnnnnnnnnnnnnnnnnnnnnnnnnnnnnnnnnnnnnnnnnnnnnnnnnnnnnnnnnnnnnnnnnnnnnnnnnnnnnnnnnnnnnnnnnnnnnnnnnnnnnnnnnnnnnnnnnnnnnnnnnnnnnnnnnnnnnnnnnnnnnnnnnnnnnnnnnnnnnnnnnnnnnnnnnnnnnnnnnnnnnnnnnnnnnnnnnnnnnnnnnnnnnnnnnnnnnnnnnnnnnnnnnnnnnnnnnnnnnnnnnnnnnnnnnnnnnnnnnnnnnnnnnnnnnnnnnnnnnnnnnnnnnnnnnnnnnnnnnnnnnnnnnnnnnnnnnnnnnnnnnnnnnnnnnnnnnnnnnnnnnnnnnnnnnnnnnnnnnnnnnnnnnnnnnnnnnnnnnnnnnnnnnnnnnnnnnnnnnnnnnnnnnnnnnnnnnnnnnnnnnnnnnnnnnnnnnnnnnnnnnnnnnnnnnnnnnnnnnnnnnnnnnnnnnnnnnnnnnnnnnnnnnnnnnnnnnnnnnnnnnnnnnnnnnnnnnnnnnnnnnnnnnnnnnnnnnnnnnnnnnnnnnnnnnnnnnnnnnnnnnnnnnnnnnnnnnnnnnnnnnnnnnnnnnnnnnnnnnnnnnnnnnnnnnnnnnnnnnnnnnnnnnnnnnnnnnnnnnnnnnnnnnnnnnnnnnnnnnnnnnnnnnnnnnnnnnnnnnnnnnnnnnnnnnnnnnnnnnnnnnnnnnnnnnnnnnnnnnnnnnnnnnnnnnnnnnnnnnnnnnnnnnnnnnnnnnnnnnnnnnnnnnnnnnnnnnnnnnnnnnnnnnnnnnnnnnnnnnnnnnnnnnnnnnnnnnnnnnnnnnnnnnnnnnnnnnnnnnnnnnnnnnnnnnnnnnnnnnnnnnnnnnnnnnnnnnnnnnnnnnnnnnnnnnnnnnnnnnnnnnnnnnnnnnnnnnnnnnnnnnnnnnnnnnnnnnnnnnnnnnnnnnnnnnnnnnnnnnnnnnnnnnnnnnnnnnnnnnnnnnnnnnnnnnnnnnnnnnnnnnnnnnnnnnnnnnnnnnnnnnnnnnnnnnnnnnnnnnnnnnnnnnnnnnnnnnnnnnnnnnnnnnnnnnnnnnnnnnnnnnnnnnnnnnnnnnnnnnnnnnnnnnnnnnnnnnnnnnnnnnnnnnnnnnnnnnnnnnnnnnnnnnnnnnnnnnnnnnnnnnnnnnnnnnnnnnnnnnnnnnnnnnnnnnnnnnnnnnnnnnnnnnnnnnnnnnnnnnnnnnnnnnnnnnnnnnnnnnnnnnnnnnnnnnnnnnnnnnnnnnnnnnnnnnnnnnnnnnnnnnnnnnnnnnnnnnnnnnnnnnnnnnnnnnnnnnnnnnnnnnnnnnnnnnnnnnnnnnnnnnnnnnnnnnnnnnnnnnnnnnnnnnnnnnnnnnnnnnnnnnnnnnnnnnnnnnnnnnnnnnnnnnnnnnnnnnnnnnnnnnnnnnnnnnnnnnnnnnnnnnnnnnnnnnnnnnnnnnnnnnnnnnnnnnnnnnnnnnnnnnnnnnnnnnnnnnnnnnnnnnnnnnnnnnnnnnnnnnnnnnnnnnnnnnnnnnnnnnnnnnnnnnnnnnnnnnnnnnnnnnnnnnnnnnnnnnnnnnnnnnnnnnnnnnnnnnnnnnnnnnnnnnnnnnnnnnnnnnnnnnnnnnnnnnnnnnnnnnnnnnnnnnnnnnnnnnnnnnnnnnnnnnnnnnnnnnnnnnnnnnnnnnnnnnnnnnnnnnnnnnnnnnnnnnnnnnnnnnnnnnnnnnnnnnnnnnnnnnnnnnnnnnnnnnnnnnnnnnnnnnnnnnnnnnnnnnnnnnnnnnnnnnnnnnnnnnnnnnnnnnnnnnnnnnnnnnnnnnnnnnnnnnnnnnnnnnnnnnnnnnnnnnnnnnnnnnnnnnnnnnnnnnnnnnnnnnnnnnnnnnnnnnnnnnnnnnnnnnnnnnnnnnnnnnnnnnnnnnnnnnnnnnnnnnnnnnnnnnnnnnnnnnnnnnnnnnnnnnnnnnnnnnnnnnnnnnnnnnnnnnnnnnnnnnnnnnnnnnnnnnnnnnnnnnnnnnnnnnnnnnnnnnnnnnnnnnnnnnnnnnnnnnnnnnnnnnnnnnnnnnnnnnnnnnnnnnnnnnnnnnnnnnnnnnnnnnnnnnnnnnnnnnnnnnnnnnnnnnnnnnnnnnnnnnnnnnnnnnnnnnnnnnnnnnnnnnnnnnnnnnnnnnnnnnnnnnnnnnnnnnnnnnnnnnnnnnnnnnnnnnnnnnnnnnnnnnnnnnnnnnnnnnnnnnnnnnnnnnnnnnnnnnnnnnnnnnnnnnnnnnnnnnnnnnnnnnnnnnnnnnnnnnnnnnnnnnnnnnnnnnnnnnnnnnnnnnnnnnnnnnnnnnnnnnnnnnnnnnnnnnnnnnnnnnnnnnnnnnnnnnnnnnnnnnnnnnnnnnnnnnnnnnnnnnnnnnnnnnnnnnnnnnnnnnnnnnnnnnnnnnnnnnnnnnnnnnnnnnnnnnnnnnnnnnnnnnnnnnnnnnnnnnnnnnnnnnnnnnnnnnnnnnnnnnnnnnnnnnnnnnnnnnnnnnnnnnnnnnnnnnnnnnnnnnnnnnnnnnnnnnnnnnnnnnnnnnnnnnnnnnnnnnnnnnnnnnnnnnnnnnnnnnnnnnnnnnnnnnnnnnnnnnnnnnnnnnnnnnnnnnnnnnnnnnnnnnnnnnnnnnnnnnnnnnnnnnnnnnnnnnnnnnnnnnnnnnnnnnnnnnnnnnnnnnnnnnnnnnnnnnnnnnnnnnnnnnnnnnnnnnnnnnnnnnnnnnnnnnnnnnnnnnnnnnnnnnnnnnnnnnnnnnnnnnnnnnnnnnnnnnnnnnnnnnnnnnnnnnnnnnnnnnnnnnnnnnnnnnnnnnnnnnnnnnnnnnnnnnnnnnnnnnnnnnnnnnnnnnnnnnnnnnnnnnnnnnnnnnnnnnnnnnnnnnnnnnnnnnnnnnnnnnnnnnnnnnnnnnnnnnnnnnnnnnnnnnnnnnnnnnnnnnnnnnnnnnnnnnnnnnnnnnnnnnnnnnnnnnnnnnnnnnnnnnnnnnnnnnnnnnnnnnnnnnnnnnnnnnnnnnnnnnnnnnnnnnnnnnnnnnnnnnnnnnnnnnnnnnnnnnnnnnnnnnnnnnnnnnnnnnnnnnnnnnnnnnnnnnnnnnnnnnnnnnnnnnnnnnnnnnnnnnnnnnnnnnnnnnnnnnnnnnnnnnnnnnnnnnnnnnnnnnnnnnnnnnnnnnnnnnnnnnnnnnnnnnnnnnnnnnnnnnnnnnnnnnnnnnnnnnnnnnnnnnnnnnnnnnnnnnnnnnnnnnnnnnnnnnnnnnnnnnnnnnnnnnnnnnnnnnnnnnnnnnnnnnnnnnnnnnnnnnnnnnnnnnnnnnnnnnnnnnnnnnnnnnnnnnnnnnnnnnnnnnnnnnnnnnnnnnnnnnnnnnnnnnnnnnnnnnnnnnnnnnnnnnnnnnnnnnnnnnnnnnnnnnnnnnnnnnnnnnnnnnnnnnnnnnnnnnnnnnnnnnnnnnnnnnnnnnnnnnnnnnnnnnnnnnnnnnnnnnnnnnnnnnnnnnnnnnnnnnnnnnnnnnnnnnnnnnnnnnnnnnnnnnnnnnnnnnnnnnnnnnnnnnnnnnnnnnnnnnnnnnnnnnnnnnnnnnnnnnnnnnnnnnnnnnnnnnnnnnnnnnnnnnnnnnnnnnnnnnnnnnnnnnnnnnnnnnnnnnnnnnnnnnnnnnnnnnnnnnnnnnnnnnnnnnnnnnnnnnnnnnnnnnnnnnnnnnnnnnnnnnnnnnnnnnnnnnnnnnnnnnnnnnnnnnnnnnnnnnnnnnnnnnnnnnnnnnnnnnnnnnnnnnnnnnnnnnnnnnnnnnnnnnnnnnnnnnnnnnnnnnnnnnnnnnnnnnnnnnnnnnnnnnnnnnnnnnnnnnnnnnnnnnnnnnnnnnnnnnnnnnnnnnnnnnnnnnnnnnnnnnnnnnnnnnnnnnnnnnnnnnnnnnnnnnnnnnnnnnnnnnnnnnnnnnnnnnnnnnnnnnnnnnnnnnnnnnnnnnnnnnnnnnnnnnnnnnnnnnnnnnnnnnnnnnnnnnnnnnnnnnnnnnnnnnnnnnnnnnnnnnnnnnnnnnnnnnnnnnnnnnnnnnnnnnnnnnnnnnnnnnnnnnnnnnnnnnnnnnnnnnnnnnnnnnnnnnnnnnnnnnnnnnnnnnnnnnnnnnnnnnnnnnnnnnnnnnnnnnnnnnnnnnnnnnnnnnnnnnnnnnnnnnnnnnnnnnnnnnnnnnnnnnnnnnnnnnnnnnnnnnnnnnnnnnnnnnnnnnnnnnnnnnnnnnnnnnnnnnnnnnnnnnnnnnnnnnnnnnnnnnnnnnnnnnnnnnnnnnnnnnnnnnnnnnnnnnnnnnnnnnnnnnnnnnnnnnnnnnnnnnnnnnnnnnnnnnnnnnnnnnnnnnnnnnnnnnnnnnnnnnnnnnnnnnnnnnnnnnnnnnnnnnnnnnnnnnnnnnnnnnnnnnnnnnnnnnnnnnnnnnnnnnnnnnnnnnnnnnnnnnnnnnnnnnnnnnnnnnnnnnnnnnnnnnnnnnnnnnnnnnnnnnnnnnnnnnnnnnnnnnnnnnnnnnnnnnnnnnnnnnnnnnnnnnnnnnnnnnnnnnnnnnnnnnnnnnnnnnnnnnnnnnnnnnnnnnnnnnnnnnnnnnnnnnnnnnnnnnnnnnnnnnnnnnnnnnnnnnnnnnnnnnnnnnnnnnnnnnnnnnnnnnnnnnnnnnnnnnnnnnnnnnnnnnnnnnnnnnnnnnnnnnnnnnnnnnnnnnnnnnnnnnnnnnnnnnnnnnnnnnnnnnnnnnnnnnnnnnnnnnnnnnnnnnnnnnnnnnnnnnnnnnnnnnnnnnnnnnnnnnnnnnnnnnnnnnnnnnnnnnnnnnnnnnnnnnnnnnnnnnnnnnnnnnnnnnnnnnnnnnnnnnnnnnnnnnnnnnnnnnnnnnnnnnnnnnnnnnnnnnnnnnnnnnnnnnnnnnnnnnnnnnnnnnnnnnnnnnnnnnnnnnnnnnnnnnnnnnnnnnnnnnnnnnnnnnnnnnnnnnnnnnnnnnnnnnnnnnnnnnnnnnnnnnnnnnnnnnnnnnnnnnnnnnnnnnnnnnnnnnnnnnnnnnnnnnnnnnnnnnnnnnnnnnnnnnnnnnnnnnnnnnnnnnnnnnnnnnnnnnnnnnnnnnnnnnnnnnnnnnnnnnnnnnnnnnnnnnnnnnnnnnnnnnnnnnnnnnnnnnnnnnnnnnnnnnnnnnnnnnnnnnnnnnnnnnnnnnnnnnnnnnnnnnnnnnnnnnnnnnnnnnnnnnnnnnnnnnnnnnnnnnnnnnnnnnnnnnnnnnnnnnnnnnnnnnnnnnnnnnnnnnnnnnnnnnnnnnnnnnnnnnnnnnnnnnnnnnnnnnnnnnnnnnnnnnnnnnnnnnnnnnnnnnnnnnnnnnnnnnnnnnnnnnnnnnnnnnnnnnnnnnnnnnnnnnnnnnnnnnnnnnnnnnnnnnnnnnnnnnnnnnnnnnnnnnnnnnnnnnnnnnnnnnnnnnnnnnnnnnnnnnnnnnnnnnnnnnnnnnnnnnnnnnnnnnnnnnnnnnnnnnnnnnnnnnnnnnnnnnnnnnnnnnnnnnnnnnnnnnnnnnnnnnnnnnnnnnnnnnnnnnnnnnnnnnnnnnnnnnnnnnnnnnnnnnnnnnnnnnnnnnnnnnnnnnnnnnnnnnnnnnnnnnnnnnnnnnnnnnnnnnnnnnnnnnnnnnnnnnnnnnnnnnnnnnnnnnnnnnnnnnnnnnnnnnnnnnnnnnnnnnnnnnnnnnnnnnnnnnnnnnnnnnnnnnnnnnnnnnnnnnnnnnnnnnnnnnnnnnnnnnnnnnnnnnnnnnnnnnnnnnnnnnnnnnnnnnnnnnnnnnnnnnnnnnnnnnnnnnnnnnnnnnnnnnnnnnnnnnnnnnnnnnnnnnnnnnnnnnnnnnnnnnnnnnnnnnnnnnnnnnnnnnnnnnnnnnnnnnnnnnnnnnnnnnnnnnnnnnnnnnnnnnnnnnnnnnnnnnnnnnnnnnnnnnnnnnnnnnnnnnnnnnnnnnnnnnnnnnnnnnnnnnnnnnnnnnnnnnnnnnnnnnnnnnnnnnnnnnnnnnnnnnnnnnnnnnnnnnnnnnnnnnnnnnnnnnnnnnnnnnnnnnnnnnnnnnnnnnnnnnnnnnnnnnnnnnnnnnnnnnnnnnnnnnnnnnnnnnnnnnnnnnnnnnnnnnnnnnnnnnnnnnnnnnnnnnnnnnnnnnnnnnnnnnnnnnnnnnnnnnnnnnnnnnnnnnnnnnnnnnnnnnnnnnnnnnnnnnnnnnnnnnnnnnnnnnnnnnnnnnnnnnnnnnnnnnnnnnnnnnnnnnnnnnnnnnnnnnnnnnnnnnnnnnnnnnnnnnnnnnnnnnnnnnnnnnnnnnnnnnnnnnnnnnnnnnnnnnnnnnnnnnnnnnnnnnnnnnnnnnnnnnnnnnnnnnnnnnnnnnnnnnnnnnnnnnnnnnnnnnnnnnnnnnnnnnnnnnnnnnnnnnnnnnnnnnnnnnnnnnnnnnnnnnnnnnnnnnnnnnnnnnnnnnnnnnnnnnnnnnnnnnnnnnnnnnnnnnnnnnnnnnnnnnnnnnnnnnnnnnnnnnnnnnnnnnnnnnnnnnnnnnnnnnnnnnnnnnnnnnnnnnnnnnnnnnnnnnnnnnnnnnnnnnnnnnnnnnnnnnnnnnnnnnnnnnnnnnnnnnnnnnnnnnnnnnnnnnnnnnnnnnnnnnnnnnnnnnnnnnnnnnnnnnnnnnnnnnnnnnnnnnnnnnnnnnnnnnnnnnnnnnnnnnnnnnnnnnnnnnnnnnnnnnnnnnnnnnnnnnnnnnnnnnnnnnnnnnnnnnnnnnnnnnnnnnnnnnnnnnnnnnnnnnnnnnnnnnnnnnnnnnnnnnnnnnnnnnnnnnnnnnnnnnnnnnnnnnnnnnnnnnnnnnnnnnnnnnnnnnnnnnnnnnnnnnnnnnnnnnnnnnnnnnnnnnnnnnnnnnnnnnnnnnnnnnnnnnnnnnnnnnnnnnnnnnnnnnnnnnnnnnnnnnnnnnnnnnnnnnnnnnnnnnnnnnnnnnnnnnnnnnnnnnnnnnnnnnnnnnnnnnnnnnnnnnnnnnnnnnnnnnnnnnnnnnnnnnnnnnnnnnnnnnnnnnnnnnnnnnnnnnnnnnnnnnnnnnnnnnnnnnnnnnnnnnnnnnnnnnnnnnnnnnnnnnnnnnnnnnnnnnnnnnnnnnnnnnnnnnnnnnnnnnnnnnnnnnnnnnnnnnnnnnnnnnnnnnnnnnnnnnnnnnnnnnnnnnnnnnnnnnnnnnnnnnnnnnnnnnnnnnnnnnnnnnnnnnnnnnnnnnnnnnnnnnnnnnnnnnnnnnnnnnnnnnnnnnnnnnnnnnnnnnnnnnnnnnnnnnnnnnnnnnnnnnnnnnnnnnnnnnnnnnnnnnnnnnnnnnnnnnnnnnnnnnnnnnnnnnnnnnnnnnnnnnnnnnnnnnnnnnnnnnnnnnnnnnnnnnnnnnnnnnnnnnnnnnnnnnnnnnnnnnnnnnnnnnnnnnnnnnnnnnnnnnnnnnnnnnnnnnnnnnnnnnnnnnnnnnnnnnnnnnnnnnnnnnnnnnnnnnnnnnnnnnnnnnnnnnnnnnnnnnnnnnnnnnnnnnnnnnnnnnnnnnnnnnnnnnnnnnnnnnnnnnnnnnnnnnnnnnnnnnnnnnnnnnnnnnnnnnnnnnnnnnnnnnnnnnnnnnnnnnnnnnnnnnnnnnnnnnnnnnnnnnnnnnnnnnnnnnnnnnnnnnnnnnnnnnnnnnnnnnnnnnnnnnnnnnnnnnnnnnnnnnnnnnnnnnnnnnnnnnnnnnnnnnnnnnnnnnnnnnnnnnnnnnnnnnnnnnnnnnnnnnnnnnnnnnnnnnnnnnnnnnnnnnnnnnnnnnnnnnnnnnnnnnnnnnnnnnnnnnnnnnnnnnnnnnnnnnnnnnnnnnnnnnnnnnnnnnnnnnnnnnnnnnnnnnnnnnnnnnnnnnnnnnnnnnnnnnnnnnnnnnnnnnnnnnnnnnnnnnnnnnnnnnnnnnnnnnnnnnnnnnnnnnnnnnnnnnnnnnnnnnnnnnnnnnnnnnnnnnnnnnnnnnnnnnnnnnnnnnnnnnnnnnnnnnnnnnnnnnnnnnnnnnnnnnnnnnnnnnnnnnnnnnnnnnnnnnnnnnnnnnnnnnnnnnnnnnnnnnnnnnnnnnnnnnnnnnnnnnnnnnnnnnnnnnnnnnnnnnnnnnnnnnnnnnnnnnnnnnnnnnnnnnnnnnnnnnnnnnnnnnnnnnnnnnnnnnnnnnnnnnnnnnnnnnnnnnnnnnnnnnnnnnnnnnnnnnnnnnnnnnnnnnnnnnnnnnnnnnnnnnnnnnnnnnnnnnnnnnnnnnnnnnnnnnnnnnnnnnnnnnnnnnnnnnnnnnnnnnnnnnnnnnnnnnnnnnnnnnnnnnnnnnnnnnnnnnnnnnnnnnnnnnnnnnnnnnnnnnnnnnnnnnnnnnnnnnnnnnnnnnnnnnnnnnnnnnnnnnnnnnnnnnnnnnnnnnnnnnnnnnnnnnnnnnnnnnnnnnnnnnnnnnnnnnnnnnnnnnnnnnnnnnnnnnnnnnnnnnnnnnnnnnnnnnnnnnnnnnnnnnnnnnnnnnnnnnnnnnnnnnnnnnnnnnnnnnnnnnnnnnnnnnnnnnnnnnnnnnnnnnnnnnnnnnnnnnnnnnnnnnnnnnnnnnnnnnnnnnnnnnnnnnnnnnnnnnnnnnnnnnnnnnnnnnnnnnnnnnnnnnnnnnnnnnnnnnnnnnnnnnnnnnnnnnnnnnnnnnnnnnnnnnnnnnnnnnnnnnnnnnnnnnnnnnnnnnnnnnnnnnnnnnnnnnnnnnnnnnnnnnnnnnnnnnnnnnnnnnnnnnnnnnnnnnnnnnnnnnnnnnnnnnnnnnnnnnnnnnnnnnnnnnnnnnnnnnnnnnnnnnnnnnnnnnnnnnnnnnnnnnnnnnnnnnnnnnnnnnnnnnnnnnnnnnnnnnnnnnnnnnnnnnnnnnnnnnnnnnnnnnnnnnnnnnnnnnnnnnnnnnnnnnnnnnnnnnnnnnnnnnnnnnnnnnnnnnnnnnnnnnnnnnnnnnnnnnnnnnnnnnnnnnnnnnnnnnnnnnnnnnnnnnnnnnnnnnnnnnnnnnnnnnnnnnnnnnnnnnnnnnnnnnnnnnnnnnnnnnnnnnnnnnnnnnnnnnnnnnnnnnnnnnnnnnnnnnnnnnnnnnnnnnnnnnnnnnnnnnnnnnnnnnnnnnnnnnnnnnnnnnnnnnnnnnnnnnnnnnnnnnnnnnnnnnnnnnnnnnnnnnnnnnnnnnnnnnnnnnnnnnnnnnnnnnnnnnnnnnnnnnnnnnnnnnnnnnnnnnnnnnnnnnnnnnnnnnnnnnnnnnnnnnnnnnnnnnnnnnnnnnnnnnnnnnnnnnnnnnnnnnnnnnnnnnnnnnnnnnnnnnnnnnnnnnnnnnnnnnnnnnnnnnnnnnnnnnnnnnnnnnnnnnnnnnnnnnnnnnnnnnnnnnnnnnnnnnnnnnnnnnnnnnnnnnnnnnnnnnnnnnnnnnnnnnnnnnnnnnnnnnnnnnnnnnnnnnnnnnnnnnnnnnnnnnnnnnnnnnnnnnnnnnnnnnnnnnnnnnnnnnnnnnnnnnnnnnnnnnnnnnnnnnnnnnnnnnnnnnnnnnnnnnnnnnnnnnnnnnnnnnnnnnnnnnnnnnnnnnnnnnnnnnnnnnnnnnnnnnnnnnnnnnnnnnnnnnnnnnnnnnnnnnnnnnnnnnnnnnnnnnnnnnnnnnnnnnnnnnnnnnnnnnnnnnnnnnnnnnnnnnnnnnnnnnnnnnnnnnnnnnnnnnnnnnnnnnnnnnnnnnnnnnnnnnnnnnnnnnnnnnnnnnnnnnnnnnnnnnnnnnnnnnnnnnnnnnnnnnnnnnnnnnnnnnnnnnnnnnnnnnnnnnnnnnnnnnnnnnnnnnnnnnnnnnnnnnnnnnnnnnnnnnnnnnnnnnnnnnnnnnnnnnnnnnnnnnnnnnnnnnnnnnnnnnnnnnnnnnnnnnnnnnnnnnnnnnnnnnnnnnnnnnnnnnnnnnnnnnnnnnnnnnnnnnnnnnnnnnnnnnnnnnnnnnnnnnnnnnnnnnnnnnnnnnnnnnnnnnnnnnnnnnnnnnnnnnnnnnnnnnnnnnnnnnnnnnnnnnnnnnnnnnnnnnnnnnnnnnnnnnnnnnnnnnnnnnnnnnnnnnnnnnnnnnnnnnnnnnnnnnnnnnnnnnnnnnnnnnnnnnnnnnnnnnnnnnnnnnnnnnnnnnnnnnnnnnnnnnnnnnnnnnnnnnnnnnnnnnnnnnnnnnnnnnnnnnnnnnnnnnnnnnnnnnnnnnnnnnnnnnnnnnnnnnnnnnnnnnnnnnnnnnnnnnnnnnnnnnnnnnnnnnnnnnnnnnnnnnnnnnnnnnnnnnnnnnnnnnnnnnnnnnnnnnnnnnnnnnnnnnnnnnnnnnnnnnnnnnnnnnnnnnnnnnnnnnnnnnnnnnnnnnnnnnnnnnnnnnnnnnnnnnnnnnnnnnnnnnnnnnnnnnnnnnnnnnnnnnnnnnnnnnnnnnnnnnnnnnnnnnnnnnnnnnnnnnnnnnnnnnnnnnnnnnnnnnnnnnnnnnnnnnnnnnnnnnnnnnnnnnnnnnnnnnnnnnnnnnnnnnnnnnnnnnnnnnnnnnnnnnnnnnnnnnnnnnnnnnnnnnnnnnnnnnnnnnnnnnnnnnnnnnnnnnnnnnnnnnnnnnnnnnnnnnnnnnnnnnnnnnnnnnnnnnnnnnnnnnnnnnnnnnnnnnnnnnnnnnnnnnnnnnnnnnnnnnnnnnnnnnnnnnnnnnnnnnnnnnnnnnnnnnnnnnnnnnnnnnnnnnnnnnnnnnnnnnnnnnnnnnnnnnnnnnnnnnnnnnnnnnnnnnnnnnnnnnnnnnnnnnnnnnnnnnnnnnnnnnnnnnnnnnnnnnnnnnnnnnnnnnnnnnnnnnnnnnnnnnnnnnnnnnnnnnnnnnnnnnnnnnnnnnnnnnnnnnnnnnnnnnnnnnnnnnnnnnnnnnnnnnnnnnnnnnnnnnnnnnnnnnnnnnnnnnnnnnnnnnnnnnnnnnnnnnnnnnnnnnnnnnnnnnnnnnnnnnnnnnnnnnnnnnnnnnnnnnnnnnnnnnnnnnnnnnnnnnnnnnnnnnnnnnnnnnnnnnnnnnnnnnnnnnnnnnnnnnnnnnnnnnnnnnnnnnnnnnnnnnnnnnnnnnnnnnnnnnnnnnnnnnnnnnnnnnnnnnnnnnnnnnnnnnnnnnnnnnnnnnnnnnnnnnnnnnnnnnnnnnnnnnnnnnnnnnnnnnnnnnnnnnnnnnnnnnnnnnnnnnnnnnnnnnnnnnnnnnnnnnnnnnnnnnnnnnnnnnnnnnnnnnnnnnnnnnnnnnnnnnnnnnnnnnnnnnnnnnnnnnnnnnnnnnnnnnnnnnnnnnnnnnnnnnnnnnnnnnnnnnnnnnnnnnnnnnnnnnnnnnnnnnnnnnnnnnnnnnnnnnnnnnnnnnnnnnnnnnnnnnnnnnnnnnnnnnnnnnnnnnnnnnnnnnnnnnnnnnnnnnnnnnnnnnnnnnnnnnnnnnnnnnnnnnnnnnnnnnnnnnnnnnnnnnnnnnnnnnnnnnnnnnnnnnnnnnnnnnnnnnnnnnnnnnnnnnnnnnnnnnnnnnnnnnnnnnnnnnnnnnnnnnnnnnnnnnnnnnnnnnnnnnnnnnnnnnnnnnnnnnnnnnnnnnnnnnnnnnnnnnnnnnnnnnnnnnnnnnnnnnnnnnnnnnnnnnnnnnnnnnnnnnnnnnnnnnnnnnnnnnnnnnnnnnnnnnnnnnnnnnnnnnnnnnnnnnnnnnnnnnnnnnnnnnnnnnnnnnnnnnnnnnnnnnnnnnnnnnnnnnnnnnnnnnnnnnnnnnnnnnnnnnnnnnnnnnnnnnnnnnnnnnnnnnnnnnnnnnnnnnnnnnnnnnnnnnnnnnnnnnnnnnnnnnnnnnnnnnnnnnnnnnnnnnnnnnnnnnnnnnnnnnnnnnnnnnnnnnnnnnnnnnnnnnnnnnnnnnnnnnnnnnnnnnnnnnnnnnnnnnnnnnnnnnnnnnnnnnnnnnnnnnnnnnnnnnnnnnnnnnnnnnnnnnnnnnnnnnnnnnnnnnnnnnnnnnnnnnnnnnnnnnnnnnnnnnnnnnnnnnnnnnnnnnnnnnnnnnnnnnnnnnnnnnnnnnnnnnnnnnnnnnnnnnnnnnnnnnnnnnnnnnnnnnnnnnnnnnnnnnnnnnnnnnnnnnnnnnnnnnnnnnnnnnnnnnnnnnnnnnnnnnnnnnnnnnnnnnnnnnnnnnnnnnnnnnnnnnnnnnnnnnnnnnnnnnnnnnnnnnnnnnnnnnnnnnnnnnnnnnnnnnnnnnnnnnnnnnnnnnnnnnnnnnnnnnnnnnnnnnnnnnnnnnnnnnnnnnnnnnnnnnnnnnnnnnnnnnnnnnnnnnnnnnnnnnnnnnnnnnnnnnnnnnnnnnnnnnnnnnnnnnnnnnnnnnnnnnnnnnnnnnnnnnnnnnnnnnnnnnnnnnnnnnnnnnnnnnnnnnnnnnnnnnnnnnnnnnnnnnnnnnnnnnnnnnnnnnnnnnnnnnnnnnnnnnnnnnnnnnnnnnnnnnnnnnnnnnnnnnnnnnnnnnnnnnnnnnnnnnnnnnnnnnnnnnnnnnnnnnnnnnnnnnnnnnnnnnnnnnnnnnnnnnnnnnnnnnnnnnnnnnnnnnnnnnnnnnnnnnnnnnnnnnnnnnnnnnnnnnnnnnnnnnnnnnnnnnnnnnnnnnnnnnnnnnnnnnnnnnnnnnnnnnnnnnnnnnnnnnnnnnnnnnnnnnnnnnnnnnnnnnnnnnnnnnnnnnnnnnnnnnnnnnnnnnnnnnnnnnnnnnnnnnnnnnnnnnnnnnnnnnnnnnnnnnnnnnnnnnnnnnnnnnnnnnnnnnnnnnnnnnnnnnnnnnnnnnnnnnnnnnnnnnnnnnnnnnnnnnnnnnnnnnnnnnnnnnnnnnnnnnnnnnnnnnnnnnnnnnnnnnnnnnnnnnnnnnnnnnnnnnnnnnnnnnnnnnnnnnnnnnnnnnnnnnnnnnnnnnnnnnnnnnnnnnnnnnnnnnnnnnnnnnnnnnnnnnnnnnnnnnnnnnnnnnnnnnnnnnnnnnnnnnnnnnnnnnnnnnnnnnnnnnnnnnnnnnnnnnnnnnnnnnnnnnnnnnnnnnnnnnnnnnnnnnnnnnnnnnnnnnnnnnnnnnnnnnnnnnnnnnnnnnnnnnnnnnnnnnnnnnnnnnnnnnnnnnnnnnnnnnnnnnnnnnnnnnnnnnnnnnnnnnnnnnnnnnnnnnnnnnnnnnnnnnnnnnnnnnnnnnnnnnnnnnnnnnnnnnnnnnnnnnnnnnnnnnnnnnnnnnnnnnnnnnnnnnnnnnnnnnnnnnnnnnnnnnnnnnnnnnnnnnnnnnnnnnnnnnnnnnnnnnnnnnnnnnnnnnnnnnnnnnnnnnnnnnnnnnnnnnnnnnnnnnnnnnnnnnnnnnnnnnnnnnnnnnnnnnnnnnnnnnnnnnnnnnnnnnnnnnnnnnnnnnnnnnnnnnnnnnnnnnnnnnnnnnnnnnnnnnnnnnnnnnnnnnnnnnnnnnnnnnnnnnnnnnnnnnnnnnnnnnnnnnnnnnnnnnnnnnnnnnnnnnnnnnnnnnnnnnnnnnnnnnnnnnnnnnnnnnnnnnnnnnnnnnnnnnnnnnnnnnnnnnnnnnnnnnnnnnnnnnnnnnnnnnnnnnnnnnnnnnnnnnnnnnnnnnnnnnnnnnnnnnnnnnnnnnnnnnnnnnnnnnnnnnnnnnnnnnnnnnnnnnnnnnnnnnnnnnnnnnnnnnnnnnnnnnnnnnnnnnnnnnnnnnnnnnnnnnnnnnnnnnnnnnnnnnnnnnnnnnnnnnnnnnnnnnnnnnnnnnnnnnnnnnnnnnnnnnnnnnnnnnnnnnnnnnnnnnnnnnnnnnnnnnnnnnnnnnnnnnnnnnnnnnnnnnnnnnnnnnnnnnnnnnnnnnnnnnnnnnnnnnnnnnnnnnnnnnnnnnnnnnnnnnnnnnnnnnnnnnnnnnnnnnnnnnnnnnnnnnnnnnnnnnnnnnnnnnnnnnnnnnnnnnnnnnnnnnnnnnnnnnnnnnnnnnnnnnnnnnnnnnnnnnnnnnnnnnnnnnnnnnnnnnnnnnnnnnnnnnnnnnnnnnnnnnnnnnnnnnnnnnnnnnnnnnnnnnnnnnnnnnnnnnnnnnnnnnnnnnnnnnnnnnnnnnnnnnnnnnnnnnnnnnnnnnnnnnnnnnnnnnnnnnnnnnnnnnnnnnnnnnnnnnnnnnnnnnnnnnnnnnnnnnnnnnnnnnnnnnnnnnnnnnnnnnnnnnnnnnnnnnnnnnnnnnnnnnnnnnnnnnnnnnnnnnnnnnnnnnnnnnnnnnnnnnnnnnnnnnnnnnnnnnnnnnnnnnnnnnnnnnnnnnnnnnnnnnnnnnnnnnnnnnnnnnnnnnnnnnnnnnnnnnnnnnnnnnnnnnnnnnnnnnnnnnnnnnnnnnnnnnnnnnnnnnnnnnnnnnnnnnnnnnnnnnnnnnnnnnnnnnnnnnnnnnnnnnnnnnnnnnnnnnnnnnnnnnnnnnnnnnnnnnnnnnnnnnnnnnnnnnnnnnnnnnnnnnnnnnnnnnnnnnnnnnnnnnnnnnnnnnnnnnnnnnnnnnnnnnnnnnnnnnnnnnnnnnnnnnnnnnnnnnnnnnnnnnnnnnnnnnnnnnnnnnnnnnnnnnnnnnnnnnnnnnnnnnnnnnnnnnnnnnnnnnnnnnnnnnnnnnnnnnnnnnnnnnnnnnnnnnnnnnnnnnnnnnnnnnnnnnnnnnnnnnnnnnnnnnnnnnnnnnnnnnnnnnnnnnnnnnnnnnnnnnnnnnnnnnnnnnnnnnnnnnnnnnnnnnnnnnnnnnnnnnnnnnnnnnnnnnnnnnnnnnnnnnnnnnnnnnnnnnnnnnnnnnnnnnnnnnnnnnnnnnnnnnnnnnnnnnnnnnnnnnnnnnnnnnnnnnnnnnnnnnnnnnnnnnnnnnnnnnnnnnnnnnnnnnnnnnnnnnnnnnnnnnnnnnnnnnnnnnnnnnnnnnnnnnnnnnnnnnnnnnnnnnnnnnnnnnnnnnnnnnnnnnnnnnnnnnnnnnnnnnnnnnnnnnnnnnnnnnnnnnnnnnnnnnnnnnnnnnnnnnnnnnnnnnnnnnnnnnnnnnnnnnnnnnnnnnnnnnnnnnnnnnnnnnnnnnnnnnnnnnnnnnnnnnnnnnnnnnnnnnnnnnnnnnnnnnnnnnnnnnnnnnnnnnnnnnnnnnnnnnnnnnnnnnnnnnnnnnnnnnnnnnnnnnnnnnnnnnnnnnnnnnnnnnnnnnnnnnnnnnnnnnnnnnnnnnnnnnnnnnnnnnnnnnnnnnnnnnnnnnnnnnnnnnnnnnnnnnnnnnnnnnnnnnnnnnnnnnnnnnnnnnnnnnnnnnnnnnnnnnnnnnnnnnnnnnnnnnnnnnnnnnnnnnnnnnnnnnnnnnnnnnnnnnnnnnnnnnnnnnnnnnnnnnnnnnnnnnnnnnnnnnnnnnnnnnnnnnnnnnnnnnnnnnnnnnnnnnnnnnnnnnnnnnnnnnnnnnnnnnnnnnnnnnnnnnnnnnnnnnnnnnnnnnnnnnnnnnnnnnnnnnnnnnnnnnnnnnnnnnnnnnnnnnnnnnnnnnnnnnnnnnnnnnnnnnnnnnnnnnnnnnnnnnnnnnnnnnnnnnnnnnnnnnnnnnnnnnnnnnnnnnnnnnnnnnnnnnnnnnnnnnnnnnnnnnnnnnnnnnnnnnnnnnnnnnnnnnnnnnnnnnnnnnnnnnnnnnnnnnnnnnnnnnnnnnnnnnnnnnnnnnnnnnnnnnnnnnnnnnnnnnnnnnnnnnnnnnnnnnnnnnnnnnnnnnnnnnnnnnnnnnnnnnnnnnnnnnnnnnnnnnnnnnnnnnnnnnnnnnnnnnnnnnnnnnnnnnnnnnnnnnnnnnnnnnnnnnnnnnnnnnnnnnnnnnnnnnnnnnnnnnnnnnnnnnnnnnnnnnnnnnnnnnnnnnnnnnnnnnnnnnnnnnnnnnnnnnnnnnnnnnnnnnnnnnnnnnnnnnnnnnnnnnnnnnnnnnnnnnnnnnnnnnnnnnnnnnnnnnnnnnnnnnnnnnnnnnnnnnnnnnnnnnnnnnnnnnnnnnnnnnnnnnnnnnnnnnnnnnnnnnnnnnnnnnnnnnnnnnnnnnnnnnnnnnnnnnnnnnnnnnnnnnnnnnnnnnnnnnnnnnnnnnnnnnnnnnnnnnnnnnnnnnnnnnnnnnnnnnnnnnnnnnnnnnnnnnnnnnnnnnnnnnnnnnnnnnnnnnnnnnnnnnnnnnnnnnnnnnnnnnnnnnnnnnnnnnnnnnnnnnnnnnnnnnnnnnnnnnnnnnnnnnnnnnnnnnnnnnnnnnnnnnnnnnnnnnnnnnnnnnnnnnnnnnnnnnnnnnnnnnnnnnnnnnnnnnnnnnnnnnnnnnnnnnnnnnnnnnnnnnnnnnnnnnnnnnnnnnnnnnnnnnnnnnnnnnnnnnnnnnnnnnnnnnnnnnnnnnnnnnnnnnnnnnnnnnnnnnnnnnnnnnnnnnnnnnnnnnnnnnnnnnnnnnnnnnnnnnnnnnnnnnnnnnnnnnnnnnnnnnnnnnnnnnnnnnnnnnnnnnnnnnnnnnnnnnnnnnnnnnnnnnnnnnnnnnnnnnnnnnnnnnnnnnnnnnnnnnnnnnnnnnnnnnnnnnnnnnnnnnnnnnnnnnnnnnnnnnnnnnnnnnnnnnnnnnnnnnnnnnnnnnnnnnnnnnnnnnnnnnnnnnnnnnnnnnnnnnnnnnnnnnnnnnnnnnnnnnnnnnnnnnnnnnnnnnnnnnnnnnnnnnnnnnnnnnnnnnnnnnnnnnnnnnnnnnnnnnnnnnnnnnnnnnnnnnnnnnnnnnnnnnnnnnnnnnnnnnnnnnnnnnnnnnnnnnnnnnnnnnnnnnnnnnnnnnnnnnnnnnnnnnnnnnnnnnnnnnnnnnnnnnnnnnnnnnnnnnnnnnnnnnnnnnnnnnnnnnnnnnnnnnnnnnnnnnnnnnnnnnnnnnnnnnnnnnnnnnnnnnnnnnnnnnnnnnnnnnnnnnnnnnnnnnnnnnnnnnnnnnnnnnnnnnnnnnnnnnnnnnnnnnnnnnnnnnnnnnnnnnnnnnnnnnnnnnnnnnnnnnnnnnnnnnnnnnnnnnnnnnnnnnnnnnnnnnnnnnnnnnnnnnnnnnnnnnnnnnnnnnnnnnnnnnnnnnnnnnnnnnnnnnnnnnnnnnnnnnnnnnnnnnnnnnnnnnnnnnnnnnnnnnnnnnnnnnnnnnnnnnnnnnnnnnnnnnnnnnnnnnnnnnnnnnnnnnnnnnnnnnnnnnnnnnnnnnnnnnnnnnnnnnnnnnnnnnnnnnnnnnnnnnnnnnnnnnnnnnnnnnnnnnnnnnnnnnnnnnnnnnnnnnnnnnnnnnnnnnnnnnnnnnnnnnnnnnnnnnnnnnnnnnnnnnnnnnnnnnnnnnnnnnnnnnnnnnnnnnnnnnnnnnnnnnnnnnnnnnnnnnnnnnnnnnnnnnnnnnnnnnnnnnnnnnnnnnnnnnnnnnnnnnnnnnnnnnnnnnnnnnnnnnnnnnnnnnnnnnnnnnnnnnnnnnnnnnnnnnnnnnnnnnnnnnnnnnnnnnnnnnnnnnnnnnnnnnnnnnnnnnnnnnnnnnnnnnnnnnnnnnnnnnnnnnnnnnnnnnnnnnnnnnnnnnnnnnnnnnnnnnnnnnnnnnnnnnnnnnnnnnnnnnnnnnnnnnnnnnnnnnnnnnnnnnnnnnnnnnnnnnnnnnnnnnnnnnnnnnnnnnnnnnnnnnnnnnnnnnnnnnnnnnnnnnnnnnnnnnnnnnnnnnnnnnnnnnnnnnnnnnnnnnnnnnnnnnnnnnnnnnnnnnnnnnnnnnnnnnnnnnnnnnnnnnnnnnnnnnnnnnnnnnnnnnnnnnnnnnnnnnnnnnnnnnnnnnnnnnnnnnnnnnnnnnnnnnnnnnnnnnnnnnnnnnnnnnnnnnnnnnnnnnnnnnnnnnnnnnnnnnnnnnnnnnnnnnnnnnnnnnnnnnnnnnnnnnnnnnnnnnnnnnnnnnnnnnnnnnnnnnnnnnnnnnnnnnnnnnnnnnnnnnnnnnnnnnnnnnnnnnnnnnnnnnnnnnnnnnnnnnnnnnnnnnnnnnnnnnnnnnnnnnnnnnnnnnnnnnnnnnnnnnnnnnnnnnnnnnnnnnnnnnnnnnnnnnnnnnnnnnnnnnnnnnnnnnnnnnnnnnnnnnnnnnnnnnnnnnnnnnnnnnnnnnnnnnnnnnnnnnnnnnnnnnnnnnnnnnnnnnnnnnnnnnnnnnnnnnnnnnnnnnnnnnnnnnnnnnnnnnnnnnnnnnnnnnnnnnnnnnnnnnnnnnnnnnnnnnnnnnnnnnnnnnnnnnnnnnnnnnnnnnnnnnnnnnnnnnnnnnnnnnnnnnnnnnnnnnnnnnnnnnnnnnnnnnnnnnnnnnnnnnnnnnnnnnnnnnnnnnnnnnnnnnnnnnnnnnnnnnnnnnnnnnnnnnnnnnnnnnnnnnnnnnnnnnnnnnnnnnnnnnnnnnnnnnnnnnnnnnnnnnnnnnnnnnnnnnnnnnnnnnnnnnnnnnnnnnnnnnnnnnnnnnnnnnnnnnnnnnnnnnnnnnnnnnnnnnnnnnnnnnnnnnnnnnnnnnnnnnnnnnnnnnnnnnnnnnnnnnnnnnnnnnnnnnnnnnnnnnnnnnnnnnnnnnnnnnnnnnnnnnnnnnnnnnnnnnnnnnnnnnnnnnnnnnnnnnnnnnnnnnnnnnnnnnnnnnnnnnnnnnnnnnnnnnnnnnnnnnnnnnnnnnnnnnnnnnnnnnnnnnnnnnnnnnnnnnnnnnnnnnnnnnnnnnnnnnnnnnnnnnnnnnnnnnnnnnnnnnnnnnnnnnnnnnnnnnnnnnnnnnnnnnnnnnnnnnnnnnnnnnnnnnnnnnnnnnnnnnnnnnnnnnnnnnnnnnnnnnnnnnnnnnnnnnnnnnnnnnnnnnnnnnnnnnnnnnnnnnnnnnnnnnnnnnnnnnnnnnnnnnnnnnnnnnnnnnnnnnnnnnnnnnnnnnnnnnnnnnnnnnnnnnnnnnnnnnnnnnnnnnnnnnnnnnnnnnnnnnnnnnnnnnnnnnnnnnnnnnnnnnnnnnnnnnnnnnnnnnnnnnnnnnnnnnnnnnnnnnnnnnnnnnnnnnnnnnnnnnnnnnnnnnnnnnnnnnnnnnnnnnnnnnnnnnnnnnnnnnnnnnnnnnnnnnnnnnnnnnnnnnnnnnnnnnnnnnnnnnnnnnnnnnnnnnnnnnnnnnnnnnnnnnnnnnnnnnnnnnnnnnnnnnnnnnnnnnnnnnnnnnnnnnnnnnnnnnnnnnnnnnnnnnnnnnnnnnnnnnnnnnnnnnnnnnnnnnnnnnnnnnnnnnnnnnnnnnnnnnnnnnnnnnnnnnnnnnnnnnnnnnnnnnnnnnnnnnnnnnnnnnnnnnnnnnnnnnnnnnnnnnnnnnnnnnnnnnnnnnnnnnnnnnnnnnnnnnnnnnnnnnnnnnnnnnnnnnnnnnnnnnnnnnnnnnnnnnnnnnnnnnnnnnnnnnnnnnnnnnnnnnnnnnnnnnnnnnnnnnnnnnnnnnnnnnnnnnnnnnnnnnnnnnnnnnnnnnnnnnnnnnnnnnnnnnnnnnnnnnnnnnnnnnnnnnnnnnnnnnnnnnnnnnnnnnnnnnnnnnnnnnnnnnnnnnnnnnnnnnnnnnnnnnnnnnnnnnnnnnnnnnnnnnnnnnnnnnnnnnnnnnnnnnnnnnnnnnnnnnnnnnnnnnnnnnnnnnnnnnnnnnnnnnnnnnnnnnnnnnnnnnnnnnnnnnnnnnnnnnnnnnnnnnnnnnnnnnnnnnnnnnnnnnnnnnnnnnnnnnnnnnnnnnnnnnnnnnnnnnnnnnnnnnnnnnnnnnnnnnnnnnnnnnnnnnnnnnnnnnnnnnnnnnnnnnnnnnnnnnnnnnnnnnnnnnnnnnnnnnnnnnnnnnnnnnnnnnnnnnnnnnnnnnnnnnnnnnnnnnnnnnnnnnnnnnnnnnnnnnnnnnnnnnnnnnnnnnnnnnnnnnnnnnnnnnnnnnnnnnnnnnnnnnnnnnnnnnnnnnnnnnnnnnnnnnnnnnnnnnnnnnnnnnnnnnnnnnnnnnnnnnnnnnnnnnnnnnnnnnnnnnnnnnnnnnnnnnnnnnnnnnnnnnnnnnnnnnnnnnnnnnnnnnnnnnnnnnnnnnnnnnnnnnnnnnnnnnnnnnnnnnnnnnnnnnnnnnnnnnnnnnnnnnnnnnnnnnnnnnnnnnnnnnnnnnnnnnnnnnnnnnnnnnnnnnnnnnnnnnnnnnnnnnnnnnnnnnnnnnnnnnnnnnnnnnnnnnnnnnnnnnnnnnnnnnnnnnnnnnnnnnnnnnnnnnnnnnnnnnnnnnnnnnnnnnnnnnnnnnnnnnnnnnnnnnnnnnnnnnnnnnnnnnnnnnnnnnnnnnnnnnnnnnnnnnnnnnnnnnnnnnnnnnnnnnnnnnnnnnnnnnnnnnnnnnnnnnnnnnnnnnnnnnnnnnnnnnnnnnnnnnnnnnnnnnnnnnnnnnnnnnnnnnnnnnnnnnnnnnnnnnnnnnnnnnnnnnnnnnnnnnnnnnnnnnnnnnnnnnnnnnnnnnnnnnnnnnnnnnnnnnnnnnnnnnnnnnnnnnnnnnnnnnnnnnnnnnnnnnnnnnnnnnnnnnnnnnnnnnnnnnnnnnnnnnnnnnnnnnnnnnnnnnnnnnnnnnnnnnnnnnnnnnnnnnnnnnnnnnnnnnnnnnnnnnnnnnnnnnnnnnnnnnnnnnnnnnnnnnnnnnnnnnnnnnnnnnnnnnnnnnnnnnnnnnnnnnnnnnnnnnnnnnnnnnnnnnnnnnnnnnnnnnnnnnnnnnnnnnnnnnnnnnnnnnnnnnnnnnnnnnnnnnnnnnnnnnnnnnnnnnnnnnnnnnnnnnnnnnnnnnnnnnnnnnnnnnnnnnnnnnnnnnnnnnnnnnnnnnnnnnnnnnnnnnnnnnnnnnnnnnnnnnnnnnnnnnnnnnnnnnnnnnnnnnnnnnnnnnnnnnnnnnnnnnnnnnnnnnnnnnnnnnnnnnnnnnnnnnnnnnnnnnnnnnnnnnnnnnnnnnnnnnnnnnnnnnnnnnnnnnnnnnnnnnnnnnnnnnnnnnnnnnnnnnnnnnnnnnnnnnnnnnnnnnnnnnnnnnnnnnnnnnnnnnnnnnnnnnnnnnnnnnnnnnnnnnnnnnnnnnnnnnnnnnnnnnnnnnnnnnnnnnnnnnnnnnnnnnnnnnnnnnnnnnnnnnnnnnnnnnnnnnnnnnnnnnnnnnnnnnnnnnnnnnnnnnnnnnnnnnnnnnnnnnnnnnnnnnnnnnnnnnnnnnnnnnnnnnnnnnnnnnnnnnnnnnnnnnnnnnnnnnnnnnnnnnnnnnnnnnnnnnnnnnnnnnnnnnnnnnnnnnnnnnnnnnnnnnnnnnnnnnnnnnnnnnnnnnnnnnnnnnnnnnnnnnnnnnnnnnnnnnnnnnnnnnnnnnnnnnnnnnnnnnnnnnnnnnnnnnnnnnnnnnnnnnnnnnnnnnnnnnnnnnnnnnnnnnnnnnnnnnnnnnnnnnnnnnnnnnnnnnnnnnnnnnnnnnnnnnnnnnnnnnnnnnnnnnnnnnnnnnnnnnnnnnnnnnnnnnnnnnnnnnnnnnnnnnnnnnnnnnnnnnnnnnnnnnnnnnnnnnnnnnnnnnnnnnnnnnnnnnnnnnnnnnnnnnnnnnnnnnnnnnnnnnnnnnnnnnnnnnnnnnnnnnnnnnnnnnnnnnnnnnnnnnnnnnnnnnnnnnnnnnnnnnnnnnnnnnnnnnnnnnnnnnnnnnnnnnnnnnnnnnnnnnnnnnnnnnnnnnnnnnnnnnnnnnnnnnnnnnnnnnnnnnnnnnnnnnnnnnnnnnnnnnnnnnnnnnnnnnnnnnnnnnnnnnnnnnnnnnnnnnnnnnnnnnnnnnnnnnnnnnnnnnnnnnnnnnnnnnnnnnnnnnnnnnnnnnnnnnnnnnnnnnnnnnnnnnnnnnnnnnnnnnnnnnnnnnnnnnnnnnnnnnnnnnnnnnnnnnnnnnnnnnnnnnnnnnnnnnnnnnnnnnnnnnnnnnnnnnnnnnnnnnnnnnnnnnnnnnnnnnnnnnnnnnnnnnnnnnnnnnnnnnnnnnnnnnnnnnnnnnnnnnnnnnnnnnnnnnnnnnnnnnnnnnnnnnnnnnnnnnnnnnnnnnnnnnnnnnnnnnnnnnnnnnnnnnnnnnnnnnnnnnnnnnnnnnnnnnnnnnnnnnnnnnnnnnnnnnnnnnnnnnnnnnnnnnnnnnnnnnnnnnnnnnnnnnnnnnnnnnnnnnnnnnnnnnnnnnnnnnnnnnnnnnnnnnnnnnnnnnnnnnnnnnnnnnnnnnnnnnnnnnnnnnnnnnnnnnnnnnnnnnnnnnnnnnnnnnnnnnnnnnnnnnnnnnnnnnnnnnnnnnnnnnnnnnnnnnnnnnnnnnnnnnnnnnnnnnnnnnnnnnnnnnnnnnnnnnnnnnnnnnnnnnnnnnnnnnnnnnnnnnnnnnnnnnnnnnnnnnnnnnnnnnnnnnnnnnnnnnnnnnnnnnnnnnnnnnnnnnnnnnnnnnnnnnnnnnnnnnnnnnnnnnnnnnnnnnnnnnnnnnnnnnnnnnnnnnnnnnnnnnnnnnnnnnnnnnnnnnnnnnnnnnnnnnnnnnnnnnnnnnnnnnnnnnnnnnnnnnnnnnnnnnnnnnnnnnnnnnnnnnnnnnnnnnnnnnnnnnnnnnnnnnnnnnnnnnnnnnnnnnnnnnnnnnnnnnnnnnnnnnnnnnnnnnnnnnnnnnnnnnnnnnnnnnnnnnnnnnnnnnnnnnnnnnnnnnnnnnnnnnnnnnnnnnnnnnnnnnnnnnnnnnnnnnnnnnnnnnnnnnnnnnnnnnnnnnnnnnnnnnnnnnnnnnnnnnnnnnnnnnnnnnnnnnnnnnnnnnnnnnnnnnnnnnnnnnnnnnnnnnnnnnnnnnnnnnnnnnnnnnnnnnnnnnnnnnnnnnnnnnnnnnnnnnnnnnnnnnnnnnnnnnnnnnnnnnnnnnnnnnnnnnnnnnnnnnnnnnnnnnnnnnnnnnnnnnnnnnnnnnnnnnnnnnnnnnnnnnnnnnnnnnnnnnnnnnnnnnnnnnnnnnnnnnnnnnnnnnnnnnnnnnnnnnnnnnnnnnnnnnnnnnnnnnnnnnnnnnnnnnnnnnnnnnnnnnnnnnnnnnnnnnnnnnnnnnnnnnnnnnnnnnnnnnnnnnnnnnnnnnnnnnnnnnnnnnnnnnnnnnnnnnnnnnnnnnnnnnnnnnnnnnnnnnnnnnnnnnnnnnnnnnnnnnnnnnnnnnnnnnnnnnnnnnnnnnnnnnnnnnnnnnnnnnnnnnnnnnnnnnnnnnnnnnnnnnnnnnnnnnnnnnnnnnnnnnnnnnnnnnnnnnnnnnnnnnnnnnnnnnnnnnnnnnnnnnnnnnnnnnnnnnnnnnnnnnnnnnnnnnnnnnnnnnnnnnnnnnnnnnnnnnnnnnnnnnnnnnnnnnnnnnnnnnnnnnnnnnnnnnnnnnnnnnnnnnnnnnnnnnnnnnnnnnnnnnnnnnnnnnnnnnnnnnnnnnnnnnnnnnnnnnnnnnnnnnnnnnnnnnnnnnnnnnnnnnnnnnnnnnnnnnnnnnnnnnnnnnnnnnnnnnnnnnnnnnnnnnnnnnnnnnnnnnnnnnnnnnnnnnnnnnnnnnnnnnnnnnnnnnnnnnnnnnnnnnnnnnnnnnnnnnnnnnnnnnnnnnnnnnnnnnnnnnnnnnnnnnnnnnnnnnnnnnnnnnnnnnnnnnnnnnnnnnnnnnnnnnnnnnnnnnnnnnnnnnnnnnnnnnnnnnnnnnnnnnnnnnnnnnnnnnnnnnnnnnnnnnnnnnnnnnnnnnnnnnnnnnnnnnnnnnnnnnnnnnnnnnnnnnnnnnnnnnnnnnnnnnnnnnnnnnnnnnnnnnnnnnnnnnnnnnnnnnnnnnnnnnnnnnnnnnnnnnnnnnnnnnnnnnnnnnnnnnnnnnnnnnnnnnnnnnnnnnnnnnnnnnnnnnnnnnnnnnnnnnnnnnnnnnnnnnnnnnnnnnnnnnnnnnnnnnnnnnnnnnnnnnnnnnnnnnnnnnnnnnnnnnnnnnnnnnnnnnnnnnnnnnnnnnnnnnnnnnnnnnnnnnnnnnnnnnnnnnnnnnnnnnnnnnnnnnnnnnnnnnnnnnnnnnnnnnnnnnnnnnnnnnnnnnnnnnnnnnnnnnnnnnnnnnnnnnnnnnnnnnnnnnnnnnnnnnnnnnnnnnnnnnnnnnnnnnnnnnnnnnnnnnnnnnnnnnnnnnnnnnnnnnnnnnnnnnnnnnnnnnnnnnnnnnnnnnnnnnnnnnnnnnnnnnnnnnnnnnnnnnnnnnnnnnnnnnnnnnnnnnnnnnnnnnnnnnnnnnnnnnnnnnnnnnnnnnnnnnnnnnnnnnnnnnnnnnnnnnnnnnnnnnnnnnnnnnnnnnnnnnnnnnnnnnnnnnnnnnnnnnnnnnnnnnnnnnnnnnnnnnnnnnnnnnnnnnnnnnnnnnnnnnnnnnnnnnnnnnnnnnnnnnnnnnnnnnnnnnnnnnnnnnnnnnnnnnnnnnnnnnnnnnnnnnnnnnnnnnnnnnnnnnnnnnnnnnnnnnnnnnnnnnnnnnnnnnnnnnnnnnnnnnnnnnnnnnnnnnnnnnnnnnnnnnnnnnnnnnnnnnnnnnnnnnnnnnnnnnnnnnnnnnnnnnnnnnnnnnnnnnnnnnnnnnnnnnnnnnnnnnnnnnnnnnnnnnnnnnnnnnnnnnnnnnnnnnnnnnnnnnnnnnnnnnnnnnnnnnnnnnnnnnnnnnnnnnnnnnnnnnnnnnnnnnnnnnnnnnnnnnnnnnnnnnnnnnnnnnnnnnnnnnnnnnnnnnnnnnnnnnnnnnnnnnnnnnnnnnnnnnnnnnnnnnnnnnnnnnnnnnnnnnnnnnnnnnnnnnnnnnnnnnnnnnnnnnnnnnnnnnnnnnnnnnnnnnnnnnnnnnnnnnnnnnnnnnnnnnnnnnnnnnnnnnnnnnnnnnnnnnnnnnnnnnnnnnnnnnnnnnnnnnnnnnnnnnnnnnnnnnnnnnnnnnnnnnnnnnnnnnnnnnnnnnnnnnnnnnnnnnnnnnnnnnnnnnnnnnnnnnnnnnnnnnnnnnnnnnnnnnnnnnnnnnnnnnnnnnnnnnnnnnnnnnnnnnnnnnnnnnnnnnnnnnnnnnnnnnnnnnnnnnnnnnnnnnnnnnnnnnnnnnnnnnnnnnnnnnnnnnnnnnnnnnnnnnnnnnnnnnnnnnnnnnnnnnnnnnnnnnnnnnnnnnnnnnnnnnnnnnnnnnnnnnnnnnnnnnnnnnnnnnnnnnnnnnnnnnnnnnnnnnnnnnnnnnnnnnnnnnnnnnnnnnnnnnnnnnnnnnnnnnnnnnnnnnnnnnnnnnnnnnnnnnnnnnnnnnnnnnnnnnnnnnnnnnnnnnnnnnnnnnnnnnnnnnnnnnnnnnnnnnnnnnnnnnnnnnnnnnnnnnnnnnnnnnnnnnnnnnnnnnnnnnnnnnnnnnnnnnnnnnnnnnnnnnnnnnnnnnnnnnnnnnnnnnnnnnnnnnnnnnnnnnnnnnnnnnnnnnnnnnnnnnnnnnnnnnnnnnnnnnnnnnnnnnnnnnnnnnnnnnnnnnnnnnnnnnnnnnnnnnnnnnnnnnnnnnnnnnnnnnnnnnnnnnnnnnnnnnnnnnnnnnnnnnnnnnnnnnnnnnnnnnnnnnnnnnnnnnnnnnnnnnnnnnnnnnnnnnnnnnnnnnnnnnnnnnnnnnnnnnnnnnnnnnnnnnnnnnnnnnnnnnnnnnnnnnnnnnnnnnnnnnnnnnnnnnnnnnnnnnnnnnnnnnnnnnnnnnnnnnnnnnnnnnnnnnnnnnnnnnnnnnnnnnnnnnnnnnnnnnnnnnnnnnnnnnnnnnnnnnnnnnnnnnnnnnnnnnnnnnnnnnnnnnnnnnnnnnnnnnnnnnnnnnnnnnnnnnnnnnnnnnnnnnnnnnnnnnnnnnnnnnnnnnnnnnnnnnnnnnnnnnnnnnnnnnnnnnnnnnnnnnnnnnnnnnnnnnnnnnnnnnnnnnnnnnnnnnnnnnnnnnnnnnnnnnnnnnnnnnnnnnnnnnnnnnnnnnnnnnnnnnnnnnnnnnnnnnnnnnnnnnnnnnnnnnnnnnnnnnnnnnnnnnnnnnnnnnnnnnnnnnnnnnnnnnnnnnnnnnnnnnnnnnnnnnnnnnnnnnnnnnnnnnnnnnnnnnnnnnnnnnnnnnnnnnnnnnnnnnnnnnnnnnnnnnnnnnnnnnnnnnnnnnnnnnnnnnnnnnnnnnnnnnnnnnnnnnnnnnnnnnnnnnnnnnnnnnnnnnnnnnnnnnnnnnnnnnnnnnnnnnnnnnnnnnnnnnnnnnnnnnnnnnnnnnnnnnnnnnnnnnnnnnnnnnnnnnnnnnnnnnnnnnnnnnnnnnnnnnnnnnnnnnnnnnnnnnnnnnnnnnnnnnnnnnnnnnnnnnnnnnnnnnnnnnnnnnnnnnnnnnnnnnnnnnnnnnnnnnnnnnnnnnnnnnnnnnnnnnnnnnnnnnnnnnnnnnnnnnnnnnnnnnnnnnnnnnnnnnnnnnnnnnnnnnnnnnnnnnnnnnnnnnnnnnnnnnnnnnnnnnnnnnnnnnnnnnnnnnnnnnnnnnnnnnnnnnnnnnnnnnnnnnnnnnnnnnnnnnnnnnnnnnnnnnnnnnnnnnnnnnnnnnnnnnnnnnnnnnnnnnnnnnnnnnnnnnnnnnnnnnnnnnnnnnnnnnnnnnnnnnnnnnnnnnnnnnnnnnnnnnnnnnnnnnnnnnnnnnnnnnnnnnnnnnnnnnnnnnnnnnnnnnnnnnnnnnnnnnnnnnnnnnnnnnnnnnnnnnnnnnnnnnnnnnnnnnnnnnnnnnnnnnnnnnnnnnnnnnnnnnnnnnnnnnnnnnnnnnnnnnnnnnnnnnnnnnnnnnnnnnnnnnnnnnnnnnnnnnnnnnnnnnnnnnnnnnnnnnnnnnnnnnnnnnnnnnnnnnnnnnnnnnnnnnnnnnnnnnnnnnnnnnnnnnnnnnnnnnnnnnnnnnnnnnnnnnnnnnnnnnnnnnnnnnnnnnnnnnnnnnnnnnnnnnnnnnnnnnnnnnnnnnnnnnnnnnnnnnnnnnnnnnnnnnnnnnnnnnnnnnnnnnnnnnnnnnnnnnnnnnnnnnnnnnnnnnnnnnnnnnnnnnnnnnnnnnnnnnnnnnnnnnnnnnnnnnnnnnnnnnnnnnnnnnnnnnnnnnnnnnnnnnnnnnnnnnnnnnnnnnnnnnnnnnnnnnnnnnnnnnnnnnnnnnnnnnnnnnnnnnnnnnnnnnnnnnnnnnnnnnnnnnnnnnnnnnnnnnnnnnnnnnnnnnnnnnnnnnnnnnnnnnnnnnnnnnnnnnnnnnnnnnnnnnnnnnnnnnnnnnnnnnnnnnnnnnnnnnnnnnnnnnnnnnnnnnnnnnnnnnnnnnnnnnnnnnnnnnnnnnnnnnnnnnnnnnnnnnnnnnnnnnnnnnnnnnnnnnnnnnnnnnnnnnnnnnnnnnnnnnnnnnnnnnnnnnnnnnnnnnnnnnnnnnnnnnnnnnnnnnnnnnnnnnnnnnnnnnnnnnnnnnnnnnnnnnnnnnnnnnnnnnnnnnnnnnnnnnnnnnnnnnnnnnnnnnnnnnnnnnnnnnnnnnnnnnnnnnnnnnnnnnnnnnnnnnnnnnnnnnnnnnnnnnnnnnnnnnnnnnnnnnnnnnnnnnnnnnnnnnnnnnnnnnnnnnnnnnnnnnnnnnnnnnnnnnnnnnnnnnnnnnnnnnnnnnnnnnnnnnnnnnnnnnnnnnnnnnnnnnnnnnnnnnnnnnnnnnnnnnnnnnnnnnnnnnnnnnnnnnnnnnnnnnnnnnnnnnnnnnnnnnnnnnnnnnnnnnnnnnnnnnnnnnnnnnnnnnnnnnnnnnnnnnnnnnnnnnnnnnnnnnnnnnnnnnnnnnnnnnnnnnnnnnnnnnnnnnnnnnnnnnnnnnnnnnnnnnnnnnnnnnnnnnnnnnnnnnnnnnnnnnnnnnnnnnnnnnnnnnnnnnnnnnnnnnnnnnnnnnnnnnnnnnnnnnnnnnnnnnnnnnnnnnnnnnnnnnnnnnnnnnnnnnnnnnnnnnnnnnnnnnnnnnnnnnnnnnnnnnnnnnnnnnnnnnnnnnnnnnnnnnnnnnnnnnnnnnnnnnnnnnnnnnnnnnnnnnnnnnnnnnnnnnnnnnnnnnnnnnnnnnnnnnnnnnnnnnnnnnnnnnnnnnnnnnnnnnnnnnnnnnnnnnnnnnnnnnnnnnnnnnnnnnnnnnnnnnnnnnnnnnnnnnnnnnnnnnnnnnnnnnnnnnnnnnnnnnnnnnnnnnnnnnnnnnnnnnnnnnnnnnnnnnnnnnnnnnnnnnnnnnnnnnnnnnnnnnnnnnnnnnnnnnnnnnnnnnnnnnnnnnnnnnnnnnnnnnnnnnnnnnnnnnnnnnnnnnnnnnnnnnnnnnnnnnnnnnnnnnnnnnnnnnnnnnnnnnnnnnnnnnnnnnnnnnnnnnnnnnnnnnnnnnnnnnnnnnnnnnnnnnnnnnnnnnnnnnnnnnnnnnnnnnnnnnnnnnnnnnnnnnnnnnnnnnnnnnnnnnnnnnnnnnnnnnnnnnnnnnnnnnnnnnnnnnnnnnnnnnnnnnnnnnnnnnnnnnnnnnnnnnnnnnnnnnnnnnnnnnnnnnnnnnnnnnnnnnnnnnnnnnnnnnnnnnnnnnnnnnnnnnnnnnnnnnnnnnnnnnnnnnnnnnnnnnnnnnnnnnnnnnnnnnnnnnnnnnnnnnnnnnnnnnnnnnnnnnnnnnnnnnnnnnnnnnnnnnnnnnnnnnnnnnnnnnnnnnnnnnnnnnnnnnnnnnnnnnnnnnnnnnnnnnnnnnnnnnnnnnnnnnnnnnnnnnnnnnnnnnnnnnnnnnnnnnnnnnnnnnnnnnnnnnnnnnnnnnnnnnnnnnnnnnnnnnnnnnnnnnnnnnnnnnnnnnnnnnnnnnnnnnnnnnnnnnnnnnnnnnnnnnnnnnnnnnnnnnnnnnnnnnnnnnnnnnnnnnnnnnnnnnnnnnnnnnnnnnnnnnnnnnnnnnnnnnnnnnnnnnnnnnnnnnnnnnnnnnnnnnnnnnnnnnnnnnnnnnnnnnnnnnnnnnnnnnnnnnnnnnnnnnnnnnnnnnnnnnnnnnnnnnnnnnnnnnnnnnnnnnnnnnnnnnnnnnnnnnnnnnnnnnnnnnnnnnnnnnnnnnnnnnnnnnnnnnnnnnnnnnnnnnnnnnnnnnnnnnnnnnnnnnnnnnnnnnnnnnnnnnnnnnnnnnnnnnnnnnnnnnnnnnnnnnnnnnnnnnnnnnnnnnnnnnnnnnnnnnnnnnnnnnnnnnnnnnnnnnnnnnnnnnnnnnnnnnnnnnnnnnnnnnnnnnnnnnnnnnnnnnnnnnnnnnnnnnnnnnnnnnnnnnnnnnnnnnnnnnnnnnnnnnnnnnnnnnnnnnnnnnnnnnnnnnnnnnnnnnnnnnnnnnnnnnnnnnnnnnnnnnnnnnnnnnnnnnnnnnnnnnnnnnnnnnnnnnnnnnnnnnnnnnnnnnnnnnnnnnnnnnnnnnnnnnnnnnnnnnnnnnnnnnnnnnnnnnnnnnnnnnnnnnnnnnnnnnnnnnnnnnnnnnnnnnnnnnnnnnnnnnnnnnnnnnnnnnnnnnnnnnnnnnnnnnnnnnnnnnnnnnnnnnnnnnnnnnnnnnnnnnnnnnnnnnnnnnnnnnnnnnnnnnnnnnnnnnnnnnnnnnnnnnnnnnnnnnnnnnnnnnnnnnnnnnnnnnnnnnnnnnnnnnnnnnnnnnnnnnnnnnnnnnnnnnnnnnnnnnnnnnnnnnnnnnnnnnnnnnnnnnnnnnnnnnnnnnnnnnnnnnnnnnnnnnnnnnnnnnnnnnnnnnnnnnnnnnnnnnnnnnnnnnnnnnnnnnnnnnnnnnnnnnnnnnnnnnnnnnnnnnnnnnnnnnnnnnnnnnnnnnnnnnnnnnnnnnnnnnnnnnnnnnnnnnnnnnnnnnnnnnnnnnnnnnnnnnnnnnnnnnnnnnnnnnnnnnnnnnnnnnnnnnnnnnnnnnnnnnnnnnnnnnnnnnnnnnnnnnnnnnnnnnnnnnnnnnnnnnnnnnnnnnnnnnnnnnnnnnnnnnnnnnnnnnnnnnnnnnnnnnnnnnnnnnnnnnnnnnnnnnnnnnnnnnnnnnnnnnnnnnnnnnnnnnnnnnnnnnnnnnnnnnnnnnnnnnnnnnnnnnnnnnnnnnnnnnnnnnnnnnnnnnnnnnnnnnnnnnnnnnnnnnnnnnnnnnnnnnnnnnnnnnnnnnnnnnnnnnnnnnnnnnnnnnnnnnnnnnnnnnnnnnnnnnnnnnnnnnnnnnnnnnnnnnnnnnnnnnnnnnnnnnnnnnnnnnnnnnnnnnnnnnnnnnnnnnnnnnnnnnnnnnnnnnnnnnnnnnnnnnnnnnnnnnnnnnnnnnnnnnnnnnnnnnnnnnnnnnnnnnnnnnnnnnnnnnnnnnnnnnnnnnnnnnnnnnnnnnnnnnnnnnnnnnnnnnnnnnnnnnnnnnnnnnnnnnnnnnnnnnnnnnnnnnnnnnnnnnnnnnnnnnnnnnnnnnnnnnnnnnnnnnnnnnnnnnnnnnnnnnnnnnnnnnnnnnnnnnnnnnnnnnnnnnnnnnnnnnnnnnnnnnnnnnnnnnnnnnnnnnnnnnnnnnnnnnnnnnnnnnnnnnnnnnnnnnnnnnnnnnnnnnnnnnnnnnnnnnnnnnnnnnnnnnnnnnnnnnnnnnnnnnnnnnnnnnnnnnnnnnnnnnnnnnnnnnnnnnnnnnnnnnnnnnnnnnnnnnnnnnnnnnnnnnnnnnnnnnnnnnnnnnnnnnnnnnnnnnnnnnnnnnnnnnnnnnnnnnnnnnnnnnnnnnnnnnnnnnnnnnnnnnnnnnnnnnnnnnnnnnnnnnnnnnnnnnnnnnnnnnnnnnnnnnnnnnnnnnnnnnnnnnnnnnnnnnnnnnnnnnnnnnnnnnnnnnnnnnnnnnnnnnnnnnnnnnnnnnnnnnnnnnnnnnnnnnnnnnnnnnnnnnnnnnnnnnnnnnnnnnnnnnnnnnnnnnnnnnnnnnnnnnnnnnnnnnnnnnnnnnnnnnnnnnnnnnnnnnnnnnnnnnnnnnnnnnnnnnnnnnnnnnnnnnnnnnnnnnnnnnnnnnnnnnnnnnnnnnnnnnnnnnnnnnnnnnnnnnnnnnnnnnnnnnnnnnnnnnnnnnnnnnnnnnnnnnnnnnnnnnnnnnnnnnnnnnnnnnnnnnnnnnnnnnnnnnnnnnnnnnnnnnnnnnnnnnnnnnnnnnnnnnnnnnnnnnnnnnnnnnnnnnnnnnnnnnnnnnnnnnnnnnnnnnnnnnnnnnnnnnnnnnnnnnnnnnnnnnnnnnnnnnnnnnnnnnnnnnnnnnnnnnnnnnnnnnnnnnnnnnnnnnnnnnnnnnnnnnnnnnnnnnnnnnnnnnnnnnnnnnnnnnnnnnnnnnnnnnnnnnnnnnnnnnnnnnnnnnnnnnnnnnnnnnnnnnnnnnnnnnnnnnnnnnnnnnnnnnnnnnnnnnnnnnnnnnnnnnnnnnnnnnnnnnnnnnnnnnnnnnnnnnnnnnnnnnnnnnnnnnnnnnnnnnnnnnnnnnnnnnnnnnnnnnnnnnnnnnnnnnnnnnnnnnnnnnnnnnnnnnnnnnnnnnnnnnnnnnnnnnnnnnnnnnnnnnnnnnnnnnnnnnnnnnnnnnnnnnnnnnnnnnnnnnnnnnnnnnnnnnnnnnnnnnnnnnnnnnnnnnnnnnnnnnnnnnnnnnnnnnnnnnnnnnnnnnnnnnnnnnnnnnnnnnnnnnnnnnnnnnnnnnnnnnnnnnnnnnnnnnnnnnnnnnnnnnnnnnnnnnnnnnnnnnnnnnnnnnnnnnnnnnnnnnnnnnnnnnnnnnnnnnnnnnnnnnnnnnnnnnnnnnnnnnnnnnnnnnnnnnnnnnnnnnnnnnnnnnnnnnnnnnnnnnnnnnnnnnnnnnnnnnnnnnnnnnnnnnnnnnnnnnnnnnnnnnnnnnnnnnnnnnnnnnnnnnnnnnnnnnnnnnnnnnnnnnnnnnnnnnnnnnnnnnnnnnnnnnnnnnnnnnnnnnnnnnnnnnnnnnnnnnnnnnnnnnnnnnnnnnnnnnnnnnnnnnnnnnnnnnnnnnnnnnnnnnnnnnnnnnnnnnnnnnnnnnnnnnnnnnnnnnnnnnnnnnnnnnnnnnnnnnnnnnnnnnnnnnnnnnnnnnnnnnnnnnnnnnnnnnnnnnnnnnnnnnnnnnnnnnnnnnnnnnnnnnnnnnnnnnnnnnnnnnnnnnnnnnnnnnnnnnnnnnnnnnnnnnnnnnnnnnnnnnnnnnnnnnnnnnnnnnnnnnnnnnnnnnnnnnnnnnnnnnnnnnnnnnnnnnnnnnnnnnnnnnnnnnnnnnnnnnnnnnnnnnnnnnnnnnnnnnnnnnnnnnnnnnnnnnnnnnnnnnnnnnnnnnnnnnnnnnnnnnnnnnnnnnnnnnnnnnnnnnnnnnnnnnnnnnnnnnnnnnnnnnnnnnnnnnnnnnnnnnnnnnnnnnnnnnnnnnnnnnnnnnnnnnnnnnnnnnnnnnnnnnnnnnnnnnnnnnnnnnnnnnnnnnnnnnnnnnnnnnnnnnnnnnnnnnnnnnnnnnnnnnnnnnnnnnnnnnnnnnnnnnnnnnnnnnnnnnnnnnnnnnnnnnnnnnnnnnnnnnnnnnnnnnnnnnnnnnnnnnnnnnnnnnnnnnnnnnnnnnnnnnnnnnnnnnnnnnnnnnnnnnnnnnnnnnnnnnnnnnnnnnnnnnnnnnnnnnnnnnnnnnnnnnnnnnnnnnnnnnnnnnnnnnnnnnnnnnnnnnnnnnnnnnnnnnnnnnnnnnnnnnnnnnnnnnnnnnnnnnnnnnnnnnnnnnnnnnnnnnnnnnnnnnnnnnnnnnnnnnnnnnnnnnnnnnnnnnnnnnnnnnnnnnnnnnnnnnnnnnnnnnnnnnnnnnnnnnnnnnnnnnnnnnnnnnnnnnnnnnnnnnnnnnnnnnnnnnnnnnnnnnnnnnnnnnnnnnnnnnnnnnnnnnnnnnnnnnnnnnnnnnnnnnnnnnnnnnnnnnnnnnnnnnnnnnnnnnnnnnnnnnnnnnnnnnnnnnnnnnnnnnnnnnnnnnnnnnnnnnnnnnnnnnnnnnnnnnnnnnnnnnnnnnnnnnnnnnnnnnnnnnnnnnnnnnnnnnnnnnnnnnnnnnnnnnnnnnnnnnnnnnnnnnnnnnnnnnnnnnnnnnnnnnnnnnnnnnnnnnnnnnnnnnnnnnnnnnnnnnnnnnnnnnnnnnnnnnnnnnnnnnnnnnnnnnnnnnnnnnnnnnnnnnnnnnnnnnnnnnnnnnnnnnnnnnnnnnnnnnnnnnnnnnnnnnnnnnnnnnnnnnnnnnnnnnnnnnnnnnnnnnnnnnnnnnnnnnnnnnnnnnnnnnnnnnnnnnnnnnnnnnnnnnnnnnnnnnnnnnnnnnnnnnnnnnnnnnnnnnnnnnnnnnnnnnnnnnnnnnnnnnnnnnnnnnnnnnnnnnnnnnnnnnnnnnnnnnnnnnnnnnnnnnnnnnnnnnnnnnnnnnnnnnnnnnnnnnnnnnnnnnnnnnnnnnnnnnnnnnnnnnnnnnnnnnnnnnnnnnnnnnnnnnnnnnnnnnnnnnnnnnnnnnnnnnnnnnnnnnnnnnnnnnnnnnnnnnnnnnnnnnnnnnnnnnnnnnnnnnnnnnnnnnnnnnnnnnnnnnnnnnnnnnnnnnnnnnnnnnnnnnnnnnnnnnnnnnnnnnnnnnnnnnnnnnnnnnnnnnnnnnnnnnnnnnnnnnnnnnnnnnnnnnnnnnnnnnnnnnnnnnnnnnnnnnnnnnnnnnnnnnnnnnnnnnnnnnnnnnnnnnnnnnnnnnnnnnnnnnnnnnnnnnnnnnnnnnnnnnnnnnnnnnnnnnnnnnnnnnnnnnnnnnnnnnnnnnnnnnnnnnnnnnnnnnnnnnnnnnnnnnnnnnnnnnnnnnnnnnnnnnnnnnnnnnnnnnnnnnnnnnnnnnnnnnnnnnnnnnnnnnnnnnnnnnnnnnnnnnnnnnnnnnnnnnnnnnnnnnnnnnnnnnnnnnnnnnnnnnnnnnnnnnnnnnnnnnnnnnnnnnnnnnnnnnnnnnnnnnnnnnnnnnnnnnnnnnnnnnnnnnnnnnnnnnnnnnnnnnnnnnnnnnnnnnnnnnnnnnnnnnnnnnnnnnnnnnnnnnnnnnnnnnnnnnnnnnnnnnnnnnnnnnnnnnnnnnnnnnnnnnnnnnnnnnnnnnnnnnnnnnnnnnnnnnnnnnnnnnnnnnnnnnnnnnnnnnnnnnnnnnnnnnnnnnnnnnnnnnnnnnnnnnnnnnnnnnnnnnnnnnnnnnnnnnnnnnnnnnnnnnnnnnnnnnnnnnnnnnnnnnnnnnnnnnnnnnnnnnnnnnnnnnnnnnnnnnnnnnnnnnnnnnnnnnnnnnnnnnnnnnnnnnnnnnnnnnnnnnnnnnnnnnnnnnnnnnnnnnnnnnnnnnnnnnnnnnnnnnnnnnnnnnnnnnnnnnnnnnnnnnnnnnnnnnnnnnnnnnnnnnnnnnnnnnnnnnnnnnnnnnnnnnnnnnnnnnnnnnnnnnnnnnnnnnnnnnnnnnnnnnnnnnnnnnnnnnnnnnnnnnnnnnnnnnnnnnnnnnnnnnnnnnnnnnnnnnnnnnnnnnnnnnnnnnnnnnnnnnnnnnnnnnnnnnnnnnnnnnnnnnnnnnnnnnnnnnnnnnnnnnnnnnnnnnnnnnnnnnnnnnnnnnnnnnnnnnnnnnnnnnnnnnnnnnnnnnnnnnnnnnnnnnnnnnnnnnnnnnnnnnnnnnnnnnnnnnnnnnnnnnnnnnnnnnnnnnnnnnnnnnnnnnnnnnnnnnnnnnnnnnnnnnnnnnnnnnnnnnnnnnnnnnnnnnnnnnnnnnnnnnnnnnnnnnnnnnnnnnnnnnnnnnnnnnnnnnnnnnnnnnnnnnnnnnnnnnnnnnnnnnnnnnnnnnnnnnnnnnnnnnnnnnnnnnnnnnnnnnnnnnnnnnnnnnnnnnnnnnnnnnnnnnnnnnnnnnnnnnnnnnnnnnnnnnnnnnnnnnnnnnnnnnnnnnnnnnnnnnnnnnnnnnnnnnnnnnnnnnnnnnnnnnnnnnnnnnnnnnnnnnnnnnnnnnnnnnnnnnnnnnnnnnnnnnnnnnnnnnnnnnnnnnnnnnnnnnnnnnnnnnnnnnnnnnnnnnnnnnnnnnnnnnnnnnnnnnnnnnnnnnnnnnnnnnnnnnnnnnnnnnnnnnnnnnnnnnnnnnnnnnnnnnnnnnnnnnnnnnnnnnnnnnnnnnnnnnnnnnnnnnnnnnnnnnnnnnnnnnnnnnnnnnnnnnnnnnnnnnnnnnnnnnnnnnnnnnnnnnnnnnnnnnnnnnnnnnnnnnnnnnnnnnnnnnnnnnnnnnnnnnnnnnnnnnnnnnnnnnnnnnnnnnnnnnnnnnnnnnnnnnnnnnnnnnnnnnnnnnnnnnnnnnnnnnnnnnnnnnnnnnnnnnnnnnnnnnnnnnnnnnnnnnnnnnnnnnnnnnnnnnnnnnnnnnnnnnnnnnnnnnnnnnnnnnnnnnnnnnnnnnnnnnnnnnnnnnnnnnnnnnnnnnnnnnnnnnnnnnnnnnnnnnnnnnnnnnnnnnnnnnnnnnnnnnnnnnnnnnnnnnnnnnnnnnnnnnnnnnnnnnnnnnnnnnnnnnnnnnnnnnnnnnnnnnnnnnnnnnnnnnnnnnnnnnnnnnnnnnnnnnnnnnnnnnnnnnnnnnnnnnnnnnnnnnnnnnnnnnnnnnnnnnnnnnnnnnnnnnnnnnnnnnnnnnnnnnnnnnnnnnnnnnnnnnnnnnnnnnnnnnnnnnnnnnnnnnnnnnnnnnnnnnnnnnnnnnnnnnnnnnnnnnnnnnnnnnnnnnnnnnnnnnnnnnnnnnnnnnnnnnnnnnnnnnnnnnnnnnnnnnnnnnnnnnnnnnnnnnnnnnnnnnnnnnnnnnnnnnnnnnnnnnnnnnnnnnnnnnnnnnnnnnnnnnnnnnnnnnnnnnnnnnnnnnnnnnnnnnnnnnnnnnnnnnnnnnnnnnnnnnnnnnnnnnnnnnnnnnnnnnnnnnnnnnnnnnnnnnnnnnnnnnnnnnnnnnnnnnnnnnnnnnnnnnnnnnnnnnnnnnnnnnnnnnnnnnnnnnnnnnnnnnnnnnnnnnnnnnnnnnnnnnnnnnnnnnnnnnnnnnnnnnnnnnnnnnnnnnnnnnnnnnnnnnnnnnnnnnnnnnnnnnnnnnnnnnnnnnnnnnnnnnnnnnnnnnnnnnnnnnnnnnnnnnnnnnnnnnnnnnnnnnnnnnnnnnnnnnnnnnnnnnnnnnnnnnnnnnnnnnnnnnnnnnnnnnnnnnnnnnnnnnnnnnnnnnnnnnnnnnnnnnnnnnnnnnnnnnnnnnnnnnnnnnnnnnnnnnnnnnnnnnnnnnnnnnnnnnnnnnnnnnnnnnnnnnnnnnnnnnnnnnnnnnnnnnnnnnnnnnnnnnnnnnnnnnnnnnnnnnnnnnnnnnnnnnnnnnnnnnnnnnnnnnnnnnnnnnnnnnnnnnnnnnnnnnnnnnnnnnnnnnnnnnnnnnnnnnnnnnnnnnnnnnnnnnnnnnnnnnnnnnnnnnnnnnnnnnnnnnnnnnnnnnnnnnnnnnnnnnnnnnnnnnnnnnnnnnnnnnnnnnnnnnnnnnnnnnnnnnnnnnnnnnnnnnnnnnnnnnnnnnnnnnnnnnnnnnnnnnnnnnnnnnnnnnnnnnnnnnnnnnnnnnnnnnnnnnnnnnnnnnnnnnnnnnnnnnnnnnnnnnnnnnnnnnnnnnnnnnnnnnnnnnnnnnnnnnnnnnnnnnnnnnnnnnnnnnnnnnnnnnnnnnnnnnnnnnnnnnnnnnnnnnnnnnnnnnnnnnnnnnnnnnnnnnnnnnnnnnnnnnnnnnnnnnnnnnnnnnnnnnnnnnnnnnnnnnnnnnnnnnnnnnnnnnnnnnnnnnnnnnnnnnnnnnnnnnnnnnnnnnnnnnnnnnnnnnnnnnnnnnnnnnnnnnnnnnnnnnnnnnnnnnnnnnnnnnnnnnnnnnnnnnnnnnnnnnnnnnnnnnnnnnnnnnnnnnnnnnnnnnnnnnnnnnnnnnnnnnnnnnnnnnnnnnnnnnnnnnnnnnnnnnnnnnnnnnnnnnnnnnnnnnnnnnnnnnnnnnnnnnnnnnnnnnnnnnnnnnnnnnnnnnnnnnnnnnnnnnnnnnnnnnnnnnnnnnnnnnnnnnnnnnnnnnnnnnnnnnnnnnnnnnnnnnnnnnnnnnnnnnnnnnnnnnnnnnnnnnnnnnnnnnnnnnnnnnnnnnnnnnnnnnnnnnnnnnnnnnnnnnnnnnnnnnnnnnnnnnnnnnnnnnnnnnnnnnnnnnnnnnnnnnnnnnnnnnnnnnnnnnnnnnnnnnnnnnnnnnnnnnnnnnnnnnnnnnnnnnnnnnnnnnnnnnnnnnnnnnnnnnnnnnnnnnnnnnnnnnnnnnnnnnnnnnnnnnnnnnnnnnnnnnnnnnnnnnnnnnnnnnnnnnnnnnnnnnnnnnnnnnnnnnnnnnnnnnnnnnnnnnnnnnnnnnnnnnnnnnnnnnnnnnnnnnnnnnnnnnnnnnnnnnnnnnnnnnnnnnnnnnnnnnnnnnnnnnnnnnnnnnnnnnnnnnnnnnnnnnnnnnnnnnnnnnnnnnnnnnnnnnnnnnnnnnnnnnnnnnnnnnnnnnnnnnnnnnnnnnnnnnnnnnnnnnnnnnnnnnnnnnnnnnnnnnnnnnnnnnnnnnnnnnnnnnnnnnnnnnnnnnnnnnnnnnnnnnnnnnnnnnnnnnnnnnnnnnnnnnnnnnnnnnnnnnnnnnnnnnnnnnnnnnnnnnnnnnnnnnnnnnnnnnnnnnnnnnnnnnnnnnnnnnnnnnnnnnnnnnnnnnnnnnnnnnnnnnnnnnnnnnnnnnnnnnnnnnnnnnnnnnnnnnnnnnnnnnnnnnnnnnnnnnnnnnnnnnnnnnnnnnnnnnnnnnnnnnnnnnnnnnnnnnnnnnnnnnnnnnnnnnnnnnnnnnnnnnnnnnnnnnnnnnnnnnnnnnnnnnnnnnnnnnnnnnnnnnnnnnnnnnnnnnnnnnnnnnnnnnnnnnnnnnnnnnnnnnnnnnnnnnnnnnnnnnnnnnnnnnnnnnnnnnnnnnnnnnnnnnnnnnnnnnnnnnnnnnnnnnnnnnnnnnnnnnnnnnnnnnnnnnnnnnnnnnnnnnnnnnnnnnnnnnnnnnnnnnnnnnnnnnnnnnnnnnnnnnnnnnnnnnnnnnnnnnnnnnnnnnnnnnnnnnnnnnnnnnnnnnnnnnnnnnnnnnnnnnnnnnnnnnnnnnnnnnnnnnnnnnnnnnnnnnnnnnnnnnnnnnnnnnnnnnnnnnnnnnnnnnnnnnnnnnnnnnnnnnnnnnnnnnnnnnnnnnnnnnnnnnnnnnnnnnnnnnnnnnnnnnnnnnnnnnnnnnnnnnnnnnnnnnnnnnnnnnnnnnnnnnnnnnnnnnnnnnnnnnnnnnnnnnnnnnnnnnnnnnnnnnnnnnnnnnnnnnnnnnnnnnnnnnnnnnnnnnnnnnnnnnnnnnnnnnnnnnnnnnnnnnnnnnnnnnnnnnnnnnnnnnnnnnnnnnnnnnnnnnnnnnnnnnnnnnnnnnnnnnnnnnnnnnnnnnnnnnnnnnnnnnnnnnnnnnnnnnnnnnnnnnnnnnnnnnnnnnnnnnnnnnnnnnnnnnnnnnnnnnnnnnnnnnnnnnnnnnnnnnnnnnnnnnnnnnnnnnnnnnnnnnnnnnnnnnnnnnnnnnnnnnnnnnnnnnnnnnnnnnnnnnnnnnnnnnnnnnnnnnnnnnnnnnnnnnnnnnnnnnnnnnnnnnnnnnnnnnnnnnnnnnnnnnnnnnnnnnnnnnnnnnnnnnnnnnnnnnnnnnnnnnnnnnnnnnnnnnnnnnnnnnnnnnnnnnnnnnnnnnnnnnnnnnnnnnnnnnnnnnnnnnnnnnnnnnnnnnnnnnnnnnnnnnnnnnnnnnnnnnnnnnnnnnnnnnnnnnnnnnnnnnnnnnnnnnnnnnnnnnnnnnnnnnnnnnnnnnnnnnnnnnnnnnnnnnnnnnnnnnnnnnnnnnnnnnnnnnnnnnnnnnnnnnnnnnnnnnnnnnnnnnnnnnnnnnnnnnnnnnnnnnnnnnnnnnnnnnnnnnnnnnnnnnnnnnnnnnnnnnnnnnnnnnnnnnnnnnnnnnnnnnnnnnnnnnnnnnnnnnnnnnnnnnnnnnnnnnnnnnnnnnnnnnnnnnnnnnnnnnnnnnnnnnnnnnnnnnnnnnnnnnnnnnnnnnnnnnnnnnnnnnnnnnnnnnnnnnnnnnnnnnnnnnnnnnnnnnnnnnnnnnnnnnnnnnnnnnnnnnnnnnnnnnnnnnnnnnnnnnnnnnnnnnnnnnnnnnnnnnnnnnnnnnnnnnnnnnnnnnnnnnnnnnnnnnnnnnnnnnnnnnnnnnnnnnnnnnnnnnnnnnnnnnnnnnnnnnnnnnnnnnnnnnnnnnnnnnnnnnnnnnnnnnnnnnnnnnnnnnnnnnnnnnnnnnnnnnnnnnnnnnnnnnnnnnnnnnnnnnnnnnnnnnnnnnnnnnnnnnnnnnnnnnnnnnnnnnnnnnnnnnnnnnnnnnnnnnnnnnnnnnnnnnnnnnnnnnnnnnnnnnnnnnnnnnnnnnnnnnnnnnnnnnnnnnnnnnnnnnnnnnnnnnnnnnnnnnnnnnnnnnnnnnnnnnnnnnnnnnnnnnnnnnnnnnnnnnnnnnnnnnnnnnnnnnnnnnnnnnnnnnnnnnnnnnnnnnnnnnnnnnnnnnnnnnnnnnnnnnnnnnnnnnnnnnnnnnnnnnnnnnnnnnnnnnnnnnnnnnnnnnnnnnnnnnnnnnnnnnnnnnnnnnnnnnnnnnnnnnnnnnnnnnnnnnnnnnnnnnnnnnnnnnnnnnnnnnnnnnnnnnnnnnnnnnnnnnnnnnnnnnnnnnnnnnnnnnnnnnnnnnnnnnnnnnnnnnnnnnnnnnnnnnnnnnnnnnnnnnnnnnnnnnnnnnnnnnnnnnnnnnnnnnnnnnnnnnnnnnnnnnnnnnnnnnnnnnnnnnnnnnnnnnnnnnnnnnnnnnnnnnnnnnnnnnnnnnnnnnnnnnnnnnnnnnnnnnnnnnnnnnnnnnnnnnnnnnnnnnnnnnnnnnnnnnnnnnnnnnnnnnnnnnnnnnnnnnnnnnnnnnnnnnnnnnnnnnnnnnnnnnnnnnnnnnnnnnnnnnnnnnnnnnnnnnnnnnnnnnnnnnnnnnnnnnnnnnnnnnnnnnnnnnnnnnnnnnnnnnnnnnnnnnnnnnnnnnnnnnnnnnnnnnnnnnnnnnnnnnnnnnnnnnnnnnnnnnnnnnnnnnnnnnnnnnnnnnnnnnnnnnnnnnnnnnnnnnnnnnnnnnnnnnnnnnnnnnnnnnnnnnnnnnnnnnnnnnnnnnnnnnnnnnnnnnnnnnnnnnnnnnnnnnnnnnnnnnnnnnnnnnnnnnnnnnnnnnnnnnnnnnnnnnnnnnnnnnnnnnnnnnnnnnnnnnnnnnnnnnnnnnnnnnnnnnnnnnnnnnnnnnnnnnnnnnnnnnnnnnnnnnnnnnnnnnnnnnnnnnnnnnnnnnnnnnnnnnnnnnnnnnnnnnnnnnnnnnnnnnnnnnnnnnnnnnnnnnnnnnnnnnnnnnnnnnnnnnnnnnnnnnnnnnnnnnnnnnnnnnnnnnnnnnnnnnnnnnnnnnnnnnnnnnnnnnnnnnnnnnnnnnnnnnnnnnnnnnnnnnnnnnnnnnnnnnnnnnnnnnnnnnnnnnnnnnnnnnnnnnnnnnnnnnnnnnnnnnnnnnnnnnnnnnnnnnnnnnnnnnnnnnnnnnnnnnnnnnnnnnnnnnnnnnnnnnnnnnnnnnnnnnnnnnnnnnnnnnnnnnnnnnnnnnnnnnnnnnnnnnnnnnnnnnnnnnnnnnnnnnnnnnnnnnnnnnnnnnnnnnnnnnnnnnnnnnnnnnnnnnnnnnnnnnnnnnnnnnnnnnnnnnnnnnnnnnnnnnnnnnnnnnnnnnnnnnnnnnnnnnnnnnnnnnnnnnnnnnnnnnnnnnnnnnnnnnnnnnnnnnnnnnnnnnnnnnnnnnnnnnnnnnnnnnnnnnnnnnnnnnnnnnnnnnnnnnnnnnnnnnnnnnnnnnnnnnnnnnnnnnnnnnnnnnnnnnnnnnnnnnnnnnnnnnnnnnnnnnnnnnnnnnnnnnnnnnnnnnnnnnnnnnnnnnnnnnnnnnnnnnnnnnnnnnnnnnnnnnnnnnnnnnnnnnnnnnnnnnnnnnnnnnnnnnnnnnnnnnnnnnnnnnnnnnnnnnnnnnnnnnnnnnnnnnnnnnnnnnnnnnnnnnnnnnnnnnnnnnnnnnnnnnnnnnnnnnnnnnnnnnnnnnnnnnnnnnnnnnnnnnnnnnnnnnnnnnnnnnnnnnnnnnnnnnnnnnnnnnnnnnnnnnnnnnnnnnnnnnnnnnnnnnnnnnnnnnnnnnnnnnnnnnnnnnnnnnnnnnnnnnnnnnnnnnnnnnnnnnnnnnnnnnnnnnnnnnnnnnnnnnnnnnnnnnnnnnnnnnnnnnnnnnnnnnnnnnnnnnnnnnnnnnnnnnnnnnnnnnnnnnnnnnnnnnnnnnnnnnnnnnnnnnnnnnnnnnnnnnnnnnnnnnnnnnnnnnnnnnnnnnnnnnnnnnnnnnnnnnnnnnnnnnnnnnnnnnnnnnnnnnnnnnnnnnnnnnnnnnnnnnnnnnnnnnnnnnnnnnnnnnnnnnnnnnnnnnnnnnnnnnnnnnnnnnnnnnnnnnnnnnnnnnnnnnnnnnnnnnnnnnnnnnnnnnnnnnnnnnnnnnnnnnnnnnnnnnnnnnnnnnnnnnnnnnnnnnnnnnnnnnnnnnnnnnnnnnnnnnnnnnnnnnnnnnnnnnnnnnnnnnnnnnnnnnnnnnnnnnnnnnnnnnnnnnnnnnnnnnnnnnnnnnnnnnnnnnnnnnnnnnnnnnnnnnnnnnnnnnnnnnnnnnnnnnnnnnnnnnnnnnnnnnnnnnnnnnnnnnnnnnnnnnnnnnnnnnnnnnnnnnnnnnnnnnnnnnnnnnnnnnnnnnnnnnnnnnnnnnnnnnnnnnnnnnnnnnnnnnnnnnnnnnnnnnnnnnnnnnnnnnnnnnnnnnnnnnnnnnnnnnnnnnnnnnnnnnnnnnnnnnnnnnnnnnnnnnnnnnnnnnnnnnnnnnnnnnnnnnnnnnnnnnnnnnnnnnnnnnnnnnnnnnnnnnnnnnnnnnnnnnnnnnnnnnnnnnnnnnnnnnnnnnnnnnnnnnnnnnnnnnnnnnnnnnnnnnnnnnnnnnnnnnnnnnnnnnnnnnnnnnnnnnnnnnnnnnnnnnnnnnnnnnnnnnnnnnnnnnnnnnnnnnnnnnnnnnnnnnnnnnnnnnnnnnnnnnnnnnnnnnnnnnnnnnnnnnnnnnnnnnnnnnnnnnnnnnnnnnnnnnnnnnnnnnnnnnnnnnnnnnnnnnnnnnnnnnnnnnnnnnnnnnnnnnnnnnnnnnnnnnnnnnnnnnnnnnnnnnnnnnnnnnnnnnnnnnnnnnnnnnnnnnnnnnnnnnnnnnnnnnnnnnnnnnnnnnnnnnnnnnnnnnnnnnnnnnnnnnnnnnnnnnnnnnnnnnnnnnnnnnnnnnnnnnnnnnnnnnnnnnnnnnnnnnnnnnnnnnnnnnnnnnnnnnnnnnnnnnnnnnnnnnnnnnnnnnnnnnnnnnnnnnnnnnnnnnnnnnnnnnnnnnnnnnnnnnnnnnnnnnnnnnnnnnnnnnnnnnnnnnnnnnnnnnnnnnnnnnnnnnnnnnnnnnnnnnnnnnnnnnnnnnnnnnnnnnnnnnnnnnnnnnnnnnnnnnnnnnnnnnnnnnnnnnnnnnnnnnnnnnnnnnnnnnnnnnnnnnnnnnnnnnnnnnnnnnnnnnnnnnnnnnnnnnnnnnnnnnnnnnnnnnnnnnnnnnnnnnnnnnnnnnnnnnnnnnnnnnnnnnnnnnnnnnnnnnnnnnnnnnnnnnnnnnnnnnnnnnnnnnnnnnnnnnnnnnnnnnnnnnnnnnnnnnnnnnnnnnnnnnnnnnnnnnnnnnnnnnnnnnnnnnnnnnnnnnnnnnnnnnnnnnnnnnnnnnnnnnnnnnnnnnnnnnnnnnnnnnnnnnnnnnnnnnnnnnnnnnnnnnnnnnnnnnnnnnnnnnnnnnnnnnnnnnnnnnnnnnnnnnnnnnnnnnnnnnnnnnnnnnnnnnnnnnnnnnnnnnnnnnnnnnnnnnnnnnnnnnnnnnnnnnnnnnnnnnnnnnnnnnnnnnnnnnnnnnnnnnnnnnnnnnnnnnnnnnnnnnnnnnnnnnnnnnnnnnnnnnnnnnnnnnnnnnnnnnnnnnnnnnnnnnnnnnnnnnnnnnnnnnnnnnnnnnnnnnnnnnnnnnnnnnnnnnnnnnnnnnnnnnnnnnnnnnnnnnnnnnnnnnnnnnnnnnnnnnnnnnnnnnnnnnnnnnnnnnnnnnnnnnnnnnnnnnnnnnnnnnnnnnnnnnnnnnnnnnnnnnnnnnnnnnnnnnnnnnnnnnnnnnnnnnnnnnnnnnnnnnnnnnnnnnnnnnnnnnnnnnnnnnnnnnnnnnnnnnnnnnnnnnnnnnnnnnnnnnnnnnnnnnnnnnnnnnnnnnnnnnnnnnnnnnnnnnnnnnnnnnnnnnnnnnnnnnnnnnnnnnnnnnnnnnnnnnnnnnnnnnnnnnnnnnnnnnnnnnnnnnnnnnnnnnnnnnnnnnnnnnnnnnnnnnnnnnnnnnnnnnnnnnnnnnnnnnnnnnnnnnnnnnnnnnnnnnnnnnnnnnnnnnnnnnnnnnnnnnnnnnnnnnnnnnnnnnnnnnnnnnnnnnnnnnnnnnnnnnnnnnnnnnnnnnnnnnnnnnnnnnnnnnnnnnnnnnnnnnnnnnnnnnnnnnnnnnnnnnnnnnnnnnnnnnnnnnnnnnnnnnnnnnnnnnnnnnnnnnnnnnnnnnnnnnnnnnnnnnnnnnnnnnnnnnnnnnnnnnnnnnnnnnnnnnnnnnnnnnnnnnnnnnnnnnnnnnnnnnnnnnnnnnnnnnnnnnnnnnnnnnnnnnnnnnnnnnnnnnnnnnnnnnnnnnnnnnnnnnnnnnnnnnnnnnnnnnnnnnnnnnnnnnnnnnnnnnnnnnnnnnnnnnnnnnnnnnnnnnnnnnnnnnnnnnnnnnnnnnnnnnnnnnnnnnnnnnnnnnnnnnnnnnnnnnnnnnnnnnnnnnnnnnnnnnnnnnnnnnnnnnnnnnnnnnnnnnnnnnnnnnnnnnnnnnnnnnnnnnnnnnnnnnnnnnnnnnnnnnnnnnnnnnnnnnnnnnnnnnnnnnnnnnnnnnnnnnnnnnnnnnnnnnnnnnnnnnnnnnnnnnnnnnnnnnnnnnnnnnnnnnnnnnnnnnnnnnnnnnnnnnnnnnnnnnnnnnnnnnnnnnnnnnnnnnnnnnnnnnnnnnnnnnnnnnnnnnnnnnnnnnnnnnnnnnnnnnnnnnnnnnnnnnnnnnnnnnnnnnnnnnnnnnnnnnnnnnnnnnnnnnnnnnnnnnnnnnnnnnnnnnnnnnnnnnnnnnnnnnnnnnnnnnnnnnnnnnnnnnnnnnnnnnnnnnnnnnnnnnnnnnnnnnnnnnnnnnnnnnnnnnnnnnnnnnnnnnnnnnnnnnnnnnnnnnnnnnnnnnnnnnnnnnnnnnnnnnnnnnnnnnnnnnnnnnnnnnnnnnnnnnnnnnnnnnnnnnnnnnnnnnnnnnnnnnnnnnnnnnnnnnnnnnnnnnnnnnnnnnnnnnnnnnnnnnnnnnnnnnnnnnnnnnnnnnnnnnnnnnnnnnnnnnnnnnnnnnnnnnnnnnnnnnnnnnnnnnnnnnnnnnnnnnnnnnnnnnnnnnnnnnnnnnnnnnnnnnnnnnnnnnnnnnnnnnnnnnnnnnnnnnnnnnnnnnnnnnnnnnnnnnnnnnnnnnnnnnnnnnnnnnnnnnnnnnnnnnnnnnnnnnnnnnnnnnnnnnnnnnnnnnnnnnnnnnnnnnnnnnnnnnnnnnnnnnnnnnnnnnnnnnnnnnnnnnnnnnnnnnnnnnnnnnnnnnnnnnnnnnnnnnnnnnnnnnnnnnnnnnnnnnnnnnnnnnnnnnnnnnnnnnnnnnnnnnnnnnnnnnnnnnnnnnnnnnnnnnnnnnnnnnnnnnnnnnnnnnnnnnnnnnnnnnnnnnnnnnnnnnnnnnnnnnnnnnnnnnnnnnnnnnnnnnnnnnnnnnnnnnnnnnnnnnnnnnnnnnnnnnnnnnnnnnnnnnnnnnnnnnnnnnnnnnnnnnnnnnnnnnnnnnnnnnnnnnnnnnnnnnnnnnnnnnnnnnnnnnnnnnnnnnnnnnnnnnnnnnnnnnnnnnnnnnnnnnnnnnnnnnnnnnnnnnnnnnnnnnnnnnnnnnnnnnnnnnnnnnnnnnnnnnnnnnnnnnnnnnnnnnnnnnnnnnnnnnnnnnnnnnnnnnnnnnnnnnnnnnnnnnnnnnnnnnnnnnnnnnnnnnnnnnnnnnnnnnnnnnnnnnnnnnnnnnnnnnnnnnnnnnnnnnnnnnnnnnnnnnnnnnnnnnnnnnnnnnnnnnnnnnnnnnnnnnnnnnnnnnnnnnnnnnnnnnnnnnnnnnnnnnnnnnnnnnnnnnnnnnnnnnnnnnnnnnnnnnnnnnnnnnnnnnnnnnnnnnnnnnnnnnnnnnnnnnnnnnnnnnnnnnnnnnnnnnnnnnnnnnnnnnnnnnnnnnnnnnnnnnnnnnnnnnnnnnnnnnnnnnnnnnnnnnnnnnnnnnnnnnnnnnnnnnnnnnnnnnnnnnnnnnnnnnnnnnnnnnnnnnnnnnnnnnnnnnnnnnnnnnnnnnnnnnnnnnnnnnnnnnnnnnnnnnnnnnnnnnnnnnnnnnnnnnnnnnnnnnnnnnnnnnnnnnnnnnnnnnnnnnnnnnnnnnnnnnnnnnnnnnnnnnnnnnnnnnnnnnnnnnnnnnnnnnnnnnnnnnnnnnnnnnnnnnnnnnnnnnnnnnnnnnnnnnnnnnnnnnnnnnnnnnnnnnnnnnnnnnnnnnnnnnnnnnnnnnnnnnnnnnnnnnnnnnnnnnnnnnnnnnnnnnnnnnnnnnnnnnnnnnnnnnnnnnnnnnnnnnnnnnnnnnnnnnnnnnnnnnnnnnnnnnnnnnnnnnnnnnnnnnnnnnnnnnnnnnnnnnnnnnnnnnnnnnnnnnnnnnnnnnnnnnnnnnnnnnnnnnnnnnnnnnnnnnnnnnnnnnnnnnnnnnnnnnnnnnnnnnnnnnnnnnnnnnnnnnnnnnnnnnnnnnnnnnnnnnnnnnnnnnnnnnnnnnnnnnnnnnnnnnnnnnnnnnnnnnnnnnnnnnnnnnnnnnnnnnnnnnnnnnnnnnnnnnnnnnnnnnnnnnnnnnnnnnnnnnnnnnnnnnnnnnnnnnnnnnnnnnnnnnnnnnnnnnnnnnnnnnnnnnnnnnnnnnnnnnnnnnnnnnnnnnnnnnnnnnnnnnnnnnnnnnnnnnnnnnnnnnnnnnnnnnnnnnnnnnnnnnnnnnnnnnnnnnnnnnnnnnnnnnnnnnnnnnnnnnnnnnnnnnnnnnnnnnnnnnnnnnnnnnnnnnnnnnnnnnnnnnnnnnnnnnnnnnnnnnnnnnnnnnnnnnnnnnnnnnnnnnnnnnnnnnnnnnnnnnnnnnnnnnnnnnnnnnnnnnnnnnnnnnnnnnnnnnnnnnnnnnnnnnnnnnnnnnnnnnnnnnnnnnnnnnnnnnnnnnnnnnnnnnnnnnnnnnnnnnnnnnnnnnnnnnnnnnnnnnnnnnnnnnnnnnnnnnnnnnnnnnnnnnnnnnnnnnnnnnnnnnnnnnnnnnnnnnnnnnnnnnnnnnnnnnnnnnnnnnnnnnnnnnnnnnnnnnnnnnnnnnnnnnnnnnnnnnnnnnnnnnnnnnnnnnnnnnnnnnnnnnnnnnnnnnnnnnnnnnnnnnnnnnnnnnnnnnnnnnnnnnnnnnnnnnnnnnnnnnnnnnnnnnnnnnnnnnnnnnnnnnnnnnnnnnnnnnnnnnnnnnnnnnnnnnnnnnnnnnnnnnnnnnnnnnnnnnnnnnnnnnnnnnnnnnnnnnnnnnnnnnnnnnnnnnnnnnnnnnnnnnnnnnnnnnnnnnnnnnnnnnnnnnnnnnnnnnnnnnnnnnnnnnnnnnnnnnnnnnnnnnnnnnnnnnnnnnnnnnnnnnnnnnnnnnnnnnnnnnnnnnnnnnnnnnnnnnnnnnnnnnnnnnnnnnnnnnnnnnnnnnnnnnnnnnnnnnnnnnnnnnnnnnnnnnnnnnnnnnnnnnnnnnnnnnnnnnnnnnnnnnnnnnnnnnnnnnnnnnnnnnnnnnnnnnnnnnnnnnnnnnnnnnnnnnnnnnnnnnnnnnnnnnnnnnnnnnnnnnnnnnnnnnnnnnnnnnnnnnnnnnnnnnnnnnnnnnnnnnnnnnnnnnnnnnnnnnnnnnnnnnnnnnnnnnnnnnnnnnnnnnnnnnnnnnnnnnnnnnnnnnnnnnnnnnnnnnnnnnnnnnnnnnnnnnnnnnnnnnnnnnnnnnnnnnnnnnnnnnnnnnnnnnnnnnnnnnnnnnnnnnnnnnnnnnnnnnnnnnnnnnnnnnnnnnnnnnnnnnnnnnnnnnnnnnnnnnnnnnnnnnnnnnnnnnnnnnnnnnnnnnnnnnnnnnnnnnnnnnnnnnnnnnnnnnnnnnnnnnnnnnnnnnnnnnnnnnnnnnnnnnnnnnnnnnnnnnnnnnnnnnnnnnnnnnnnnnnnnnnnnnnnnnnnnnnnnnnnnnnnnnnnnnnnnnnnnnnnnnnnnnnnnnnnnnnnnnnnnnnnnnnnnnnnnnnnnnnnnnnnnnnnnnnnnnnnnnnnnnnnnnnnnnnnnnnnnnnnnnnnnnnnnnnnnnnnnnnnnnnnnnnnnnnnnnnnnnnnnnnnnnnnnnnnnnnnnnnnnnnnnnnnnnnnnnnnnnnnnnnnnnnnnnnnnnnnnnnnnnnnnnnnnnnnnnnnnnnnnnnnnnnnnnnnnnnnnnnnnnnnnnnnnnnnnnnnnnnnnnnnnnnnnnnnnnnnnnnnnnnnnnnnnnnnnnnnnnnnnnnnnnnnnnnnnnnnnnnnnnnnnnnnnnnnnnnnnnnnnnnnnnnnnnnnnnnnnnnnnnnnnnnnnnnnnnnnnnnnnnnnnnnnnnnnnnnnnnnnnnnnnnnnnnnnnnnnnnnnnnnnnnnnnnnnnnnnnnnnnnnnnnnnnnnnnnnnnnnnnnnnnnnnnnnnnnnnnnnnnnnnnnnnnnnnnnnnnnnnnnnnnnnnnnnnnnnnnnnnnnnnnnnnnnnnnnnnnnnnnnnnnnnnnnnnnnnnnnnnnnnnnnnnnnnnnnnnnnnnnnnnnnnnnnnnnnnnnnnnnnnnnnnnnnnnnnnnnnnnnnnnnnnnnnnnnnnnnnnnnnnnnnnnnnnnnnnnnnnnnnnnnnnnnnnnnnnnnnnnnnnnnnnnnnnnnnnnnnnnnnnnnnnnnnnnnnnnnnnnnnnnnnnnnnnnnnnnnnnnnnnnnnnnnnnnnnnnnnnnnnnnnnnnnnnnnnnnnnnnnnnnnnnnnnnnnnnnnnnnnnnnnnnnnnnnnnnnnnnnnnnnnnnnnnnnnnnnnnnnnnnnnnnnnnnnnnnnnnnnnnnnnnnnnnnnnnnnnnnnnnnnnnnnnnnnnnnnnnnnnnnnnnnnnnnnnnnnnnnnnnnnnnnnnnnnnnnnnnnnnnnnnnnnnnnnnnnnnnnnnnnnnnnnnnnnnnnnnnnnnnnnnnnnnnnnnnnnnnnnnnnnnnnnnnnnnnnnnnnnnnnnnnnnnnnnnnnnnnnnnnnnnnnnnnnnnnnnnnnnnnnnnnnnnnnnnnnnnnnnnnnnnnnnnnnnnnnnnnnnnnnnnnnnnnnnnnnnnnnnnnnnnnnnnnnnnnnnnnnnnnnnnnnnnnnnnnnnnnnnnnnnnnnnnnnnnnnnnnnnnnnnnnnnnnnnnnnnnnnnnnnnnnnnnnnnnnnnnnnnnnnnnnnnnnnnnnnnnnnnnnnnnnnnnnnnnnnnnnnnnnnnnnnnnnnnnnnnnnnnnnnnnnnnnnnnnnnnnnnnnnnnnnnnnnnnnnnnnnnnnnnnnnnnnnnnnnnnnnnnnnnnnnnnnnnnnnnnnnnnnnnnnnnnnnnnnnnnnnnnnnnnnnnnnnnnnnnnnnnnnnnnnnnnnnnnnnnnnnnnnnnnnnnnnnnnnnnnnnnnnnnnnnnnnnnnnnnnnnnnnnnnnnnnnnnnnnnnnnnnnnnnnnnnnnnnnnnnnnnnnnnnnnnnnnnnnnnnnnnnnnnnnnnnnnnnnnnnnnnnnnnnnnnnnnnnnnnnnnnnnnnnnnnnnnnnnnnnnnnnnnnnnnnnnnnnnnnnnnnnnnnnnnnnnnnnnnnnnnnnnnnnnnnnnnnnnnnnnnnnnnnnnnnnnnnnnnnnnnnnnnnnnnnnnnnnnnnnnnnnnnnnnnnnnnnnnnnnnnnnnnnnnnnnnnnnnnnnnnnnnnnnnnnnnnnnnnnnnnnnnnnnnnnnnnnnnnnnnnnnnnnnnnnnnnnnnnnnnnnnnnnnnnnnnnnnnnnnnnnnnnnnnnnnnnnnnnnnnnnnnnnnnnnnnnnnnnnnnnnnnnnnnnnnnnnnnnnnnnnnnnnnnnnnnnnnnnnnnnnnnnnnnnnnnnnnnnnnnnnnnnnnnnnnnnnnnnnnnnnnnnnnnnnnnnnnnnnnnnnnnnnnnnnnnnnnnnnnnnnnnnnnnnnnnnnnnnnnnnnnnnnnnnnnnnnnnnnnnnnnnnnnnnnnnnnnnnnnnnnnnnnnnnnnnnnnnnnnnnnnnnnnnnnnnnnnnnnnnnnnnnnnnnnnnnnnnnnnnnnnnnnnnnnnnnnnnnnnnnnnnnnnnnnnnnnnnnnnnnnnnnnnnnnnnnnnnnnnnnnnnnnnnnnnnnnnnnnnnnnnnnnnnnnnnnnnnnnnnnnnnnnnnnnnnnnnnnnnnnnnnnnnnnnnnnnnnnnnnnnnnnnnnnnnnnnnnnnnnnnnnnnnnnnnnnnnnnnnnnnnnnnnnnnnnnnnnnnnnnnnnnnnnnnnnnnnnnnnnnnnnnnnnnnnnnnnnnnnnnnnnnnnnnnnnnnnnnnnnnnnnnnnnnnnnnnnnnnnnnnnnnnnnnnnnnnnnnnnnnnnnnnnnnnnnnnnnnnnnnnnnnnnnnnnnnnnnnnnnnnnnnnnnnnnnnnnnnnnnnnnnnnnnnnnnnnnnnnnnnnnnnnnnnnnnnnnnnnnnnnnnnnnnnnnnnnnnnnnnnnnnnnnnnnnnnnnnnnnnnnnnnnnnnnnnnnnnnnnnnnnnnnnnnnnnnnnnnnnnnnnnnnnnnnnnnnnnnnnnnnnnnnnnnnnnnnnnnnnnnnnnnnnnnnnnnnnnnnnnnnnnnnnnnnnnnnnnnnnnnnnnnnnnnnnnnnnnnnnnnnnnnnnnnnnnnnnnnnnnnnnnnnnnnnnnnnnnnnnnnnnnnnnnnnnnnnnnnnnnnnnnnnnnnnnnnnnnnnnnnnnnnnnnnnnnnnnnnnnnnnnnnnnnnnnnnnnnnnnnnnnnnnnnnnnnnnnnnnnnnnnnnnnnnnnnnnnnnnnnnnnnnnnnnnnnnnnnnnnnnnnnnnnnnnnnnnnnnnnnnnnnnnnnnnnnnnnnnnnnnnnnnnnnnnnnnnnnnnnnnnnnnnnnnnnnnnnnnnnnnnnnnnnnnnnnnnnnnnnnnnnnnnnnnnnnnnnnnnnnnnnnnnnnnnnnnnnnnnnnnnnnnnnnnnnnnnnnnnnnnnnnnnnnnnnnnnnnnnnnnnnnnnnnnnnnnnnnnnnnnnnnnnnnnnnnnnnnnnnnnnnnnnnnnnnnnnnnnnnnnnnnnnnnnnnnnnnnnnnnnnnnnnnnnnnnnnnnnnnnnnnnnnnnnnnnnnnnnnnnnnnnnnnnnnnnnnnnnnnnnnnnnnnnnnnnnnnnnnnnnnnnnnnnnnnnnnnnnnnnnnnnnnnnnnnnnnnnnnnnnnnnnnnnnnnnnnnnnnnnnnnnnnnnnnnnnnnnnnnnnnnnnnnnnnnnnnnnnnnnnnnnnnnnnnnnnnnnnnnnnnnnnnnnnnnnnnnnnnnnnnnnnnnnnnnnnnnnnnnnnnnnnnnnnnnnnnnnnnnnnnnnnnnnnnnnnnnnnnnnnnnnnnnnnnnnnnnnnnnnnnnnnnnnnnnnnnnnnnnnnnnnnnnnnnnnnnnnnnnnnnnnnnnnnnnnnnnnnnnnnnnnnnnnnnnnnnnnnnnnnnnnnnnnnnnnnnnnnnnnnnnnnnnnnnnnnnnnnnnnnnnnnnnnnnnnnnnnnnnnnnnnnnnnnnnnnnnnnnnnnnnnnnnnnnnnnnnnnnnnnnnnnnnnnnnnnnnnnnnnnnnnnnnnnnnnnnnnnnnnnnnnnnnnnnnnnnnnnnnnnnnnnnnnnnnnnnnnnnnnnnnnnnnnnnnnnnnnnnnnnnnnnnnnnnnnnnnnnnnnnnnnnnnnnnnnnnnnnnnnnnnnnnnnnnnnnnnnnnnnnnnnnnnnnnnnnnnnnnnnnnnnnnnnnnnnnnnnnnnnnnnnnnnnnnnnnnnnnnnnnnnnnnnnnnnnnnnnnnnnnnnnnnnnnnnnnnnnnnnnnnnnnnnnnnnnnnnnnnnnnnnnnnnnnnnnnnnnnnnnnnnnnnnnnnnnnnnnnnnnnnnnnnnnnnnnnnnnnnnnnnnnnnnnnnnnnnnnnnnnnnnnnnnnnnnnnnnnnnnnnnnnnnnnnnnnnnnnnnnnnnnnnnnnnnnnnnnnnnnnnnnnnnnnnnnnnnnnnnnnnnnnnnnnnnnnnnnnnnnnnnnnnnnnnnnnnnnnnnnnnnnnnnnnnnnnnnnnnnnnnnnnnnnnnnnnnnnnnnnnnnnnnnnnnnnnnnnnnnnnnnnnnnnnnnnnnnnnnnnnnnnnnnnnnnnnnnnnnnnnnnnnnnnnnnnnnnnnnnnnnnnnnnnnnnnnnnnnnnnnnnnnnnnnnnnnnnnnnnnnnnnnnnnnnnnnnnnnnnnnnnnnnnnnnnnnnnnnnnnnnnnnnnnnnnnnnnnnnnnnnnnnnnnnnnnnnnnnnnnnnnnnnnnnnnnnnnnnnnnnnnnnnnnnnnnnnnnnnnnnnnnnnnnnnnnnnnnnnnnnnnnnnnnnnnnnnnnnnnnnnnnnnnnnnnnnnnnnnnnnnnnnnnnnnnnnnnnnnnnnnnnnnnnnnnnnnnnnnnnnnnnnnnnnnnnnnnnnnnnnnnnnnnnnnnnnnnnnnnnnnnnnnnnnnnnnnnnnnnnnnnnnnnnnnnnnnnnnnnnnnnnnnnnnnnnnnnnnnnnnnnnnnnnnnnnnnnnnnnnnnnnnnnnnnnnnnnnnnnnnnnnnnnnnnnnnnnnnnnnnnnnnnnnnnnnnnnnnnnnnnnnnnnnnnnnnnnnnnnnnnnnnnnnnnnnnnnnnnnnnnnnnnnnnnnnnnnnnnnnnnnnnnnnnnnnnnnnnnnnnnnnnnnnnnnnnnnnnnnnnnnnnnnnnnnnnnnnnnnnnnnnnnnnnnnnnnnnnnnnnnnnnnnnnnnnnnnnnnnnnnnnnnnnnnnnnnnnnnnnnnnnnnnnnnnnnnnnnnnnnnnnnnnnnnnnnnnnnnnnnnnnnnnnnnnnnnnnnnnnnnnnnnnnnnnnnnnnnnnnnnnnnnnnnnnnnnnnnnnnnnnnnnnnnnnnnnnnnnnnnnnnnnnnnnnnnnnnnnnnnnnnnnnnnnnnnnnnnnnnnnnnnnnnnnnnnnnnnnnnnnnnnnnnnnnnnnnnnnnnnnnnnnnnnnnnnnnnnnnnnnnnnnnnnnnnnnnnnnnnnnnnnnnnnnnnnnnnnnnnnnnnnnnnnnnnnnnnnnnnnnnnnnnnnnnnnnnnnnnnnnnnnnnnnnnnnnnnnnnnnnnnnnnnnnnnnnnnnnnnnnnnnnnnnnnnnnnnnnnnnnnnnnnnnnnnnnnnnnnnnnnnnnnnnnnnnnnnnnnnnnnnnnnnnnnnnnnnnnnnnnnnnnnnnnnnnnnnnnnnnnnnnnnnnnnnnnnnnnnnnnnnnnnnnnnnnnnnnnnnnnnnnnnnnnnnnnnnnnnnnnnnnnnnnnnnnnnnnnnnnnnnnnnnnnnnnnnnnnnnnnnnnnnnnnnnnnnnnnnnnnnnnnnnnnnnnnnnnnnnnnnnnnnnnnnnnnnnnnnnnnnnnnnnnnnnnnnnnnnnnnnnnnnnnnnnnnnnnnnnnnnnnnnnnnnnnnnnnnnnnnnnnnnnnnnnnnnnnnnnnnnnnnnnnnnnnnnnnnnnnnnnnnnnnnnnnnnnnnnnnnnnnnnnnnnnnnnnnnnnnnnnnnnnnnnnnnnnnnnnnnnnnnnnnnnnnnnnnnnnnnnnnnnnnnnnnnnnnnnnnnnnnnnnnnnnnnnnnnnnnnnnnnnnnnnnnnnnnnnnnnnnnnnnnnnnnnnnnnnnnnnnnnnnnnnnnnnnnnnnnnnnnnnnnnnnnnnnnnnnnnnnnnnnnnnnnnnnnnnnnnnnnnnnnnnnnnnnnnnnnnnnnnnnnnnnnnnnnnnnnnnnnnnnnnnnnnnnnnnnnnnnnnnnnnnnnnnnnnnnnnnnnnnnnnnnnnnnnnnnnnnnnnnnnnnnnnnnnnnnnnnnnnnnnnnnnnnnnnnnnnnnnnnnnnnnnnnnnnnnnnnnnnnnnnnnnnnnnnnnnnnnnnnnnnnnnnnnnnnnnnnnnnnnnnnnnnnnnnnnnnnnnnnnnnnnnnnnnnnnnnnnnnnnnnnnnnnnnnnnnnnnnnnnnnnnnnnnnnnnnnnnnnnnnnnnnnnnnnnnnnnnnnnnnnnnnnnnnnnnnnnnnnnnnnnnnnnnnnnnnnnnnnnnnnnnnnnnnnnnnnnnnnnnnnnnnnnnnnnnnnnnnnnnnnnnnnnnnnnnnnnnnnnnnnnnnnnnnnnnnnnnnnnnnnnnnnnnnnnnnnnnnnnnnnnnnnnnnnnnnnnnnnnnnnnnnnnnnnnnnnnnnnnnnnnnnnnnnnnnnnnnnnnnnnnnnnnnnnnnnnnnnnnnnnnnnnnnnnnnnnnnnnnnnnnnnnnnnnnnnnnnnnnnnnnnnnnnnnnnnnnnnnnnnnnnnnnnnnnnnnnnnnnnnnnnnnnnnnnnnnnnnnnnnnnnnnnnnnnnnnnnnnnnnnnnnnnnnnnnnnnnnnnnnnnnnnnnnnnnnnnnnnnnnnnnnnnnnnnnnnnnnnnnnnnnnnnnnnnnnnnnnnnnnnnnnnnnnnnnnnnnnnnnnnnnnnnnnnnnnnnnnnnnnnnnnnnnnnnnnnnnnnnnnnnnnnnnnnnnnnnnnnnnnnnnnnnnnnnnnnnnnnnnnnnnnnnnnnnnnnnnnnnnnnnnnnnnnnnnnnnnnnnnnnnnnnnnnnnnnnnnnnnnnnnnnnnnnnnnnnnnnnnnnnnnnnnnnnnnnnnnnnnnnnnnnnnnnnnnnnnnnnnnnnnnnnnnnnnnnnnnnnnnnnnnnnnnnnnnnnnnnnnnnnnnnnnnnnnnnnnnnnnnnnnnnnnnnnnnnnnnnnnnnnnnnnnnnnnnnnnnnnnnnnnnnnnnnnnnnnnnnnnnnnnnnnnnnnnnnnnnnnnnnnnnnnnnnnnnnnnnnnnnnnnnnnnnnnnnnnnnnnnnnnnnnnnnnnnnnnnnnnnnnnnnnnnnnnnnnnnnnnnnnnnnnnnnnnnnnnnnnnnnnnnnnnnnnnnnnnnnnnnnnnnnnnnnnnnnnnnnnnnnnnnnnnnnnnnnnnnnnnnnnnnnnnnnnnnnnnnnnnnnnnnnnnnnnnnnnnnnnnnnnnnnnnnnnnnnnnnnnnnnnnnnnnnnnnnnnnnnnnnnnnnnnnnnnnnnnnnnnnnnnnnnnnnnnnnnnnnnnnnnnnnnnnnnnnnnnnnnnnnnnnnnnnnnnnnnnnnnnnnnnnnnnnnnnnnnnnnnnnnnnnnnnnnnnnnnnnnnnnnnnnnnnnnnnnnnnnnnnnnnnnnnnnnnnnnnnnnnnnnnnnnnnnnnnnnnnnnnnnnnnnnnnnnnnnnnnnnnnnnnnnnnnnnnnnnnnnnnnnnnnnnnnnnnnnnnnnnnnnnnnnnnnnnnnnnnnnnnnnnnnnnnnnnnnnnnnnnnnnnnnnnnnnnnnnnnnnnnnnnnnnnnnnnnnnnnnnnnnnnnnnnnnnnnnnnnnnnnnnnnnnnnnnnnnnnnnnnnnnnnnnnnnnnnnnnnnnnnnnnnnnnnnnnnnnnnnnnnnnnnnnnnnnnnnnnnnnnnnnnnnnnnnnnnnnnnnnnnnnnnnnnnnnnnnnnnnnnnnnnnnnnnnnnnnnnnnnnnnnnnnnnnnnnnnnnnnnnnnnnnnnnnnnnnnnnnnnnnnnnnnnnnnnnnnnnnnnnnnnnnnnnnnnnnnnnnnnnnnnnnnnnnnnnnnnnnnnnnnnnnnnnnnnnnnnnnnnnnnnnnnnnnnnnnnnnnnnnnnnnnnnnnnnnnnnnnnnnnnnnnnnnnnnnnnnnnnnnnnnnnnnnnnnnnnnnnnnnnnnnnnnnnnnnnnnnnnnnnnnnnnnnnnnnnnnnnnnnnnnnnnnnnnnnnnnnnnnnnnnnnnnnnnnnnnnnnnnnnnnnnnnnnnnnnnnnnnnnnnnnnnnnnnnnnnnnnnnnnnnnnnnnnnnnnnnnnnnnnnnnnnnnnnnnnnnnnnnnnnnnnnnnnnnnnnnnnnnnnnnnnnnnnnnnnnnnnnnnnnnnnnnnnnnnnnnnnnnnnnnnnnnnnnnnnnnnnnnnnnnnnnnnnnnnnnnnnnnnnnnnnnnnnnnnnnnnnnnnnnnnnnnnnnnnnnnnnnnnnnnnnnnnnnnnnnnnnnnnnnnnnnnnnnnnnnnnnnnnnnnnnnnnnnnnnnnnnnnnnnnnnnnnnnnnnnnnnnnnnnnnnnnnnnnnnnnnnnnnnnnnnnnnnnnnnnnnnnnnnnnnnnnnnnnnnnnnnnnnnnnnnnnnnnnnnnnnnnnnnnnnnnnnnnnnnnnnnnnnnnnnnnnnnnnnnnnnnnnnnnnnnnnnnnnnnnnnnnnnnnnnnnnnnnnnnnnnnnnnnnnnnnnnnnnnnnnnnnnnnnnnnnnnnnnnnnnnnnnnnnnnnnnnnnnnnnnnnnnnnnnnnnnnnnnnnnnnnnnnnnnnnnnnnnnnnnnnnnnnnnnnnnnnnnnnnnnnnnnnnnnnnnnnnnnnnnnnnnnnnnnnnnnnnnnnnnnnnnnnnnnnnnnnnnnnnnnnnnnnnnnnnnnnnnnnnnnnnnnnnnnnnnnnnnnnnnnnnnnnnnnnnnnnnnnnnnnnnnnnnnnnnnnnnnnnnnnnnnnnnnnnnnnnnnnnnnnnnnnnnnnnnnnnnnnnnnnnnnnnnnnnnnnnnnnnnnnnnnnnnnnnnnnnnnnnnnnnnnnnnnnnnnnnnnnnnnnnnnnnnnnnnnnnnnnnnnnnnnnnnnnnnnnnnnnnnnnnnnnnnnnnnnnnnnnnnnnnnnnnnnnnnnnnnnnnnnnnnnnnnnnnnnnnnnnnnnnnnnnnnnnnnnnnnnnnnnnnnnnnnnnnnnnnnnnnnnnnnnnnnnnnnnnnnnnnnnnnnnnnnnnnnnnnnnnnnnnnnnnnnnnnnnnnnnnnnnnnnnnnnnnnnnnnnnnnnnnnnnnnnnnnnnnnnnnnnnnnnnnnnnnnnnnnnnnnnnnnnnnnnnnnnnnnnnnnnnnnnnnnnnnnnnnnnnnnnnnnnnnnnnnnnnnnnnnnnnnnnnnnnnnnnnnnnnnnnnnnnnnnnnnnnnnnnnnnnnnnnnnnnnnnnnnnnnnnnnnnnnnnnnnnnnnnnnnnnnnnnnnnnnnnnnnnnnnnnnnnnnnnnnnnnnnnnnnnnnnnnnnnnnnnnnnnnnnnnnnnnnnnnnnnnnnnnnnnnnnnnnnnnnnnnnnnnnnnnnnnnnnnnnnnnnnnnnnnnnnnnnnnnnnnnnnnnnnnnnnnnnnnnnnnnnnnnnnnnnnnnnnnnnnnnnnnnnnnnnnnnnnnnnnnnnnnnnnnnnnnnnnnnnnnnnnnnnnnnnnnnnnnnnnnnnnnnnnnnnnnnnnnnnnnnnnnnnnnnnnnnnnnnnnnnnnnnnnnnnnnnnnnnnnnnnnnnnnnnnnnnnnnnnnnnnnnnnnnnnnnnnnnnnnnnnnnnnnnnnnnnnnnnnnnnnnnnnnnnnnnnnnnnnnnnnnnnnnnnnnnnnnnnnnnnnnnnnnnnnnnnnnnnnnnnnnnnnnnnnnnnnnnnnnnnnnnnnnnnnnnnnnnnnnnnnnnnnnnnnnnnnnnnnnnnnnnnnnnnnnnnnnnnnnnnnnnnnnnnnnnnnnnnnnnnnnnnnnnnnnnnnnnnnnnnnnnnnnnnnnnnnnnnnnnnnnnnnnnnnnnnnnnnnnnnnnnnnnnnnnnnnnnnnnnnnnnnnnnnnnnnnnnnnnnnnnnnnnnnnnnnnnnnnnnnnnnnnnnnnnnnnnnnnnnnnnnnnnnnnnnnnnnnnnnnnnnnnnnnnnnnnnnnnnnnnnnnnnnnnnnnnnnnnnnnnnnnnnnnnnnnnnnnnnnnnnnnnnnnnnnnnnnnnnnnnnnnnnnnnnnnnnnnnnnnnnnnnnnnnnnnnnnnnnnnnnnnnnnnnnnnnnnnnnnnnnnnnnnnnnnnnnnnnnnnnnnnnnnnnnnnnnnnnnnnnnnnnnnnnnnnnnnnnnnnnnnnnnnnnnnnnnnnnnnnnnnnnnnnnnnnnnnnnnnnnnnnnnnnnnnnnnnnnnnnnnnnnnnnnnnnnnnnnnnnnnnnnnnnnnnnnnnnnnnnnnnnnnnnnnnnnnnnnnnnnnnnnnnnnnnnnnnnnnnnnnnnnnnnnnnnnnnnnnnnnnnnnnnnnnnnnnnnnnnnnnnnnnnnnnnnnnnnnnnnnnnnnnnnnnnnnnnnnnnnnnnnnnnnnnnnnnnnnnnnnnnnnnnnnnnnnnnnnnnnnnnnnnnnnnnnnnnnnnnnnnnnnnnnnnnnnnnnnnnnnnnnnnnnnnnnnnnnnnnnnnnnnnnnnnnnnnnnnnnnnnnnnnnnnnnnnnnnnnnnnnnnnnnnnnnnnnnnnnnnnnnnnnnnnnnnnnnnnnnnnnnnnnnnnnnnnnnnnnnnnnnnnnnnnnnnnnnnnnnnnnnnnnnnnnnnnnnnnnnnnnnnnnnnnnnnnnnnnnnnnnnnnnnnnnnnnnnnnnnnnnnnnnnnnnnnnnnnnnnnnnnnnnnnnnnnnnnnnnnnnnnnnnnnnnnnnnnnnnnnnnnnnnnnnnnnnnnnnnnnnnnnnnnnnnnnnnnnnnnnnnnnnnnnnnnnnnnnnnnnnnnnnnnnnnnnnnnnnnnnnnnnnnnnnnnnnnnnnnnnnnnnnnnnnnnnnnnnnnnnnnnnnnnnnnnnnnnnnnnnnnnnnnnnnnnnnnnnnnnnnnnnnnnnnnnnnnnnnnnnnnnnnnnnnnnnnnnnnnnnnnnnnnnnnnnnnnnnnnnnnnnnnnnnnnnnnnnnnnnnnnnnnnnnnnnnnnnnnnnnnnnnnnnnnnnnnnnnnnnnnnnnnnnnnnnnnnnnnnnnnnnnnnnnnnnnnnnnnnnnnnnnnnnnnnnnnnnnnnnnnnnnnnnnnnnnnnnnnnnnnnnnnnnnnnnnnnnnnnnnnnnnnnnnnnnnnnnnnnnnnnnnnnnnnnnnnnnnnnnnnnnnnnnnnnnnnnnnnnnnnnnnnnnnnnnnnnnnnnnnnnnnnnnnnnnnnnnnnnnnnnnnnnnnnnnnnnnnnnnnnnnnnnnnnnnnnnnnnnnnnnnnnnnnnnnnnnnnnnnnnnnnnnnnnnnnnnnnnnnnnnnnnnnnnnnnnnnnnnnnnnnnnnnnnnnnnnnnnnnnnnnnnnnnnnnnnnnnnnnnnnnnnnnnnnnnnnnnnnnnnnnnnnnnnnnnnnnnnnnnnnnnnnnnnnnnnnnnnnnnnnnnnnnnnnnnnnnnnnnnnnnnnnnnnnnnnnnnnnnnnnnnnnnnnnnnnnnnnnnnnnnnnnnnnnnnnnnnnnnnnnnnnnnnnnnnnnnnnnnnnnnnnnnnnnnnnnnnnnnnnnnnnnnnnnnnnnnnnnnnnnnnnnnnnnnnnnnnnnnnnnnnnnnnnnnnnnnnnnnnnnnnnnnnnnnnnnnnnnnnnnnnnnnnnnnnnnnnnnnnnnnnnnnnnnnnnnnnnnnnnnnnnnnnnnnnnnnnnnnnnnnnnnnnnnnnnnnnnnnnnnnnnnnnnnnnnnnnnnnnnnnnnnnnnnnnnnnnnnnnnnnnnnnnnnnnnnnnnnnnnnnnnnnnnnnnnnnnnnnnnnnnnnnnnnnnnnnnnnnnnnnnnnnnnnnnnnnnnnnnnnnnnnnnnnnnnnnnnnnnnnnnnnnnnnnnnnnnnnnnnnnnnnnnnnnnnnnnnnnnnnnnnnnnnnnnnnnnnnnnnnnnnnnnnnnnnnnnnnnnnnnnnnnnnnnnnnnnnnnnnnnnnnnnnnnnnnnnnnnnnnnnnnnnnnnnnnnnnnnnnnnnnnnnnnnnnnnnnnnnnnnnnnnnnnnnnnnnnnnnnnnnnnnnnnnnnnnnnnnnnnnnnnnnnnnnnnnnnnnnnnnnnnnnnnnnnnnnnnnnnnnnnnnnnnnnnnnnnnnnnnnnnnnnnnnnnnnnnnnnnnnnnnnnnnnnnnnnnnnnnnnnnnnnnnnnnnnnnnnnnnnnnnnnnnnnnnnnnnnnnnnnnnnnnnnnnnnnnnnnnnnnnnnnnnnnnnnnnnnnnnnnnnnnnnnnnnnnnnnnnnnnnnnnnnnnnnnnnnnnnnnnnnnnnnnnnnnnnnnnnnnnnnnnnnnnnnnnnnnnnnnnnnnnnnnnnnnnnnnnnnnnnnnnnnnnnnnnnnnnnnnnnnnnnnnnnnnnnnnnnnnnnnnnnnnnnnnnnnnnnnnnnnnnnnnnnnnnnnnnnnnnnnnnnnnnnnnnnnnnnnnnnnnnnnnnnnnnnnnnnnnnnnnnnnnnnnnnnnnnnnnnnnnnnnnnnnnnnnnnnnnnnnnnnnnnnnnnnnnnnnnnnnnnnnnnnnnnnnnnnnnnnnnnnnnnnnnnnnnnnnnnnnnnnnnnnnnnnnnnnnnnnnnnnnnnnnnnnnnnnnnnnnnnnnnnnnnnnnnnnnnnnnnnnnnnnnnnnnnnnnnnnnnnnnnnnnnnnnnnnnnnnnnnnnnnnnnnnnnnnnnnnnnnnnnnnnnnnnnnnnnnnnnnnnnnnnnnnnnnnnnnnnnnnnnnnnnnnnnnnnnnnnnnnnnnnnnnnnnnnnnnnnnnnnnnnnnnnnnnnnnnnnnnnnnnnnnnnnnnnnnnnnnnnnnnnnnnnnnnnnnnnnnnnnnnnnnnnnnnnnnnnnnnnnnnnnnnnnnnnnnnnnnnnnnnnnnnnnnnnnnnnnnnnnnnnnnnnnnnnnnnnnnnnnnnnnnnnnnnnnnnnnnnnnnnnnnnnnnnnnnnnnnnnnnnnnnnnnnnnnnnnnnnnnnnnnnnnnnnnnnnnnnnnnnnnnnnnnnnnnnnnnnnnnnnnnnnnnnnnnnnnnnnnnnnnnnnnnnnnnnnnnnnnnnnnnnnnnnnnnnnnnnnnnnnnnnnnnnnnnnnnnnnnnnnnnnnnnnnnnnnnnnnnnnnnnnnnnnnnnnnnnnnnnnnnnnnnnnnnnnnnnnnnnnnnnnnnnnnnnnnnnnnnnnnnnnnnnnnnnnnnnnnnnnnnnnnnnnnnnnnnnnnnnnnnnnnnnnnnnnnnnnnnnnnnnnnnnnnnnnnnnnnnnnnnnnnnnnnnnnnnnnnnnnnnnnnnnnnnnnnnnnnnnnnnnnnnnnnnnnnnnnnnnnnnnnnnnnnnnnnnnnnnnnnnnnnnnnnnnnnnnnnnnnnnnnnnnnnnnnnnnnnnnnnnnnnnnnnnnnnnnnnnnnnnnnnnnnnnnnnnnnnnnnnnnnnnnnnnnnnnnnnnnnnnnnnnnnnnnnnnnnnnnnnnnnnnnnnnnnnnnnnnnnnnnnnnnnnnnnnnnnnnnnnnnnnnnnnnnnnnnnnnnnnnnnnnnnnnnnnnnnnnnnnnnnnnnnnnnnnnnnnnnnnnnnnnnnnnnnnnnnnnnnnnnnnnnnnnnnnnnnnnnnnnnnnnnnnnnnnnnnnnnnnnnnnnnnnnnnnnnnnnnnnnnnnnnnnnnnnnnnnnnnnnnnnnnnnnnnnnnnnnnnnnnnnnnnnnnnnnnnnnnnnnnnnnnnnnnnnnnnnnnnnnnnnnnnnnnnnnnnnnnnnnnnnnnnnnnnnnnnnnnnnnnnnnnnnnnnnnnnnnnnnnnnnnnnnnnnnnnnnnnnnnnnnnnnnnnnnnnnnnnnnnnnnnnnnnnnnnnnnnnnnnnnnnnnnnnnnnnnnnnnnnnnnnnnnnnnnnnnnnnnnnnnnnnnnnnnnnnnnnnnnnnnnnnnnnnnnnnnnnnnnnnnnnnnnnnnnnnnnnnnnnnnnnnnnnnnnnnnnnnnnnnnnnnnnnnnnnnnnnnnnnnnnnnnnnnnnnnnnnnnnnnnnnnnnnnnnnnnnnnnnnnnnnnnnnnnnnnnnnnnnnnnnnnnnnnnnnnnnnnnnnnnnnnnnnnnnnnnnnnnnnnnnnnnnnnnnnnnnnnnnnnnnnnnnnnnnnnnnnnnnnnnnnnnnnnnnnnnnnnnnnnnnnnnnnnnnnnnnnnnnnnnnnnnnnnnnnnnnnnnnnnnnnnnnnnnnnnnnnnnnnnnnnnnnnnnnnnnnnnnnnnnnnnnnnnnnnnnnnnnnnnnnnnnnnnnnnnnnnnnnnnnnnnnnnnnnnnnnnnnnnnnnnnnnnnnnnnnnnnnnnnnnnnnnnnnnnnnnnnnnnnnnnnnnnnnnnnnnnnnnnnnnnnnnnnnnnnnnnnnnnnnnnnnnnnnnnnnnnnnnnnnnnnnnnnnnnnnnnnnnnnnnnnnnnnnnnnnnnnnnnnnnnnnnnnnnnnnnnnnnnnnnnnnnnnnnnnnnnnnnnnnnnnnnnnnnnnnnnnnnnnnnnnnnnnnnnnnnnnnnnnnnnnnnnnnnnnnnnnnnnnnnnnnnnnnnnnnnnnnnnnnnnnnnnnnnnnnnnnnnnnnnnnnnnnnnnnnnnnnnnnnnnnnnnnnnnnnnnnnnnnnnnnnnnnnnnnnnnnnnnnnnnnnnnnnnnnnnnnnnnnnnnnnnnnnnnnnnnnnnnnnnnnnnnnnnnnnnnnnnnnnnnnnnnnnnnnnnnnnnnnnnnnnnnnnnnnnnnnnnnnnnnnnnnnnnnnnnnnnnnnnnnnnnnnnnnnnnnnnnnnnnnnnnnnnnnnnnnnnnnnnnnnnnnnnnnnnnnnnnnnnnnnnnnnnnnnnnnnnnnnnnnnnnnnnnnnnnnnnnnnnnnnnnnnnnnnnnnnnnnnnnnnnnnnnnnnnnnnnnnnnnnnnnnnnnnnnnnnnnnnnnnnnnnnnnnnnnnnnnnnnnnnnnnnnnnnnnnnnnnnnnnnnnnnnnnnnnnnnnnnnnnnnnnnnnnnnnnnnnnnnnnnnnnnnnnnnnnnnnnnnnnnnnnnnnnnnnnnnnnnnnnnnnnnnnnnnnnnnnnnnnnnnnnnnnnnnnnnnnnnnnnnnnnnnnnnnnnnnnnnnnnnnnnnnnnnnnnnnnnnnnnnnnnnnnnnnnnnnnnnnnnnnnnnnnnnnnnnnnnnnnnnnnnnnnnnnnnnnnnnnnnnnnnnnnnnnnnnnnnnnnnnnnnnnnnnnnnnnnnnnnnnnnnnnnnnnnnnnnnnnnnnnnnnnnnnnnnnnnnnnnnnnnnnnnnnnnnnnnnnnnnnnnnnnnnnnnnnnnnnnnnnnnnnnnnnnnnnnnnnnnnnnnnnnnnnnnnnnnnnnnnnnnnnnnnnnnnnnnnnnnnnnnnnnnnnnnnnnnnnnnnnnnnnnnnnnnnnnnnnnnnnnnnnnnnnnnnnnnnnnnnnnnnnnnnnnnnnnnnnnnnnnnnnnnnnnnnnnnnnnnnnnnnnnnnnnnnnnnnnnnnnnnnnnnnnnnnnnnnnnnnnnnnnnnnnnnnnnnnnnnnnnnnnnnnnnnnnnnnnnnnnnnnnnnnnnnnnnnnnnnnnnnnnnnnnnnnnnnnnnnnnnnnnnnnnnnnnnnnnnnnnnnnnnnnnnnnnnnnnnnnnnnnnnnnnnnnnnnnnnnnnnnnnnnnnnnnnnnnnnnnnnnnnnnnnnnnnnnnnnnnnnnnnnnnnnnnnnnnnnnnnnnnnnnnnnnnnnnnnnnnnnnnnnnnnnnnnnnnnnnnnnnnnnnnnnnnnnnnnnnnnnnnnnnnnnnnnnnnnnnnnnnnnnnnnnnnnnnnnnnnnnnnnnnnnnnnnnnnnnnnnnnnnnnnnnnnnnnnnnnnnnnnnnnnnnnnnnnnnnnnnnnnnnnnnnnnnnnnnnnnnnnnnnnnnnnnnnnnnnnnnnnnnnnnnnnnnnnnnnnnnnnnnnnnnnnnnnnnnnnnnnnnnnnnnnnnnnnnnnnnnnnnnnnnnnnnnnnnnnnnnnnnnnnnnnnnnnnnnnnnnnnnnnnnnnnnnnnnnnnnnnnnnnnnnnnnnnnnnnnnnnnnnnnnnnnnnnnnnnnnnnnnnnnnnnnnnnnnnnnnnnnnnnnnnnnnnnnnnnnnnnnnnnnnnnnnnnnnnnnnnnnnnnnnnnnnnnnnnnnnnnnnnnnnnnnnnnnnnnnnnnnnnnnnnnnnnnnnnnnnnnnnnnnnnnnnnnnnnnnnnnnnnnnnnnnnnnnnnnnnnnnnnnnnnnnnnnnnnnnnnnnnnnnnnnnnnnnnnnnnnnnnnnnnnnnnnnnnnnnnnnnnnnnnnnnnnnnnnnnnnnnnnnnnnnnnnnnnnnnnnnnnnnnnnnnnnnnnnnnnnnnnnnnnnnnnnnnnnnnnnnnnnnnnnnnnnnnnnnnnnnnnnnnnnnnnnnnnnnnnnnnnnnnnnnnnnnnnnnnnnnnnnnnnnnnnnnnnnnnnnnnnnnnnnnnnnnnnnnnnnnnnnnnnnnnnnnnnnnnnnnnnnnnnnnnnnnnnnnnnnnnnnnnnnnnnnnnnnnnnnnnnnnnnnnnnnnnnnnnnnnnnnnnnnnnnnnnnnnnnnnnnnnnnnnnnnnnnnnnnnnnnnnnnnnnnnnnnnnnnnnnnnnnnnnnnnnnnnnnnnnnnnnnnnnnnnnnnnnnnnnnnnnnnnnnnnnnnnnnnnnnnnnnnnnnnnnnnnnnnnnnnnnnnnnnnnnnnnnnnnnnnnnnnnnnnnnnnnnnnnnnnnnnnnnnnnnnnnnnnnnnnnnnnnnnnnnnnnnnnnnnnnnnnnnnnnnnnnnnnnnnnnnnnnnnnnnnnnnnnnnnnnnnnnnnnnnnnnnnnnnnnnnnnnnnnnnnnnnnnnnnnnnnnnnnnnnnnnnnnnnnnnnnnnnnnnnnnnnnnnnnnnnnnnnnnnnnnnnnnnnnnnnnnnnnnnnnnnnnnnnnnnnnnnnnnnnnnnnnnnnnnnnnnnnnnnnnnnnnnnnnnnnnnnnnnnnnnnnnnnnnnnnnnnnnnnnnnnnnnnnnnnnnnnnnnnnnnnnnnnnnnnnnnnnnnnnnnnnnnnnnnnnnnnnnnnnnnnnnnnnnnnnnnnnnnnnnnnnnnnnnnnnnnnnnnnnnnnnnnnnnnnnnnnnnnnnnnnnnnnnnnnnnnnnnnnnnnnnnnnnnnnnnnnnnnnnnnnnnnnnnnnnnnnnnnnnnnnnnnnnnnnnnnnnnnnnnnnnnnnnnnnnnnnnnnnnnnnnnnnnnnnnnnnnnnnnnnnnnnnnnnnnnnnnnnnnnnnnnnnnnnnnnnnnnnnnnnnnnnnnnnnnnnnnnnnnnnnnnnnnnnnnnnnnnnnnnnnnnnnnnnnnnnnnnnnnnnnnnnnnnnnnnnnnnnnnnnnnnnnnnnnnnnnnnnnnnnnnnnnnnnnnnnnnnnnnnnnnnnnnnnnnnnnnnnnnnnnnnnnnnnnnnnnnnnnnnnnnnnnnnnnnnnnnnnnnnnnnnnnnnnnnnnnnnnnnnnnnnnnnnnnnnnnnnnnnnnnnnnnnnnnnnnnnnnnnnnnnnnnnnnnnnnnnnnnnnnnnnnnnnnnnnnnnnnnnnnnnnnnnnnnnnnnnnnnnnnnnnnnnnnnnnnnnnnnnnnnnnnnnnnnnnnnnnnnnnnnnnnnnnnnnnnnnnnnnnnnnnnnnnnnnnnnnnnnnnnnnnnnnnnnnnnnnnnnnnnnnnnnnnnnnnnnnnnnnnnnnnnnnnnnnnnnnnnnnnnnnnnnnnnnnnnnnnnnnnnnnnnnnnnnnnnnnnnnnnnnnnnnnnnnnnnnnnnnnnnnnnnnnnnnnnnnnnnnnnnnnnnnnnnnnnnnnnnnnnnnnnnnnnnnnnnnnnnnnnnnnnnnnnnnnnnnnnnnnnnnnnnnnnnnnnnnnnnnnnnnnnnnnnnnnnnnnnnnnnnnnnnnnnnnnnnnnnnnnnnnnnnnnnnnnnnnnnnnnnnnnnnnnnnnnnnnnnnnnnnnnnnnnnnnnnnnnnnnnnnnnnnnnnnnnnnnnnnnnnnnnnnnnnnnnnnnnnnnnnnnnnnnnnnnnnnnnnnnnnnnnnnnnnnnnnnnnnnnnnnnnnnnnnnnnnnnnnnnnnnnnnnnnnnnnnnnnnnnnnnnnnnnnnnnnnnnnnnnnnnnnnnnnnnnnnnnnnnnnnnnnnnnnnnnnnnnnnnnnnnnnnnnnnnnnnnnnnnnnnnnnnnnnnnnnnnnnnnnnnnnnnnnnnnnnnnnnnnnnnnnnnnnnnnnnnnnnnnnnnnnnnnnnnnnnnnnnnnnnnnnnnnnnnnnnnnnnnnnnnnnnnnnnnnnnnnnnnnnnnnnnnnnnnnnnnnnnnnnnnnnnnnnnnnnnnnnnnnnnnnnnnnnnnnnnnnnnnnnnnnnnnnnnnnnnnnnnnnnnnnnnnnnnnnnnnnnnnnnnnnnnnnnnnnnnnnnnnnnnnnnnnnnnnnnnnnnnnnnnnnnnnnnnnnnnnnnnnnnnnnnnnnnnnnnnnnnnnnnnnnnnnnnnnnnnnnnnnnnnnnnnnnnnnnnnnnnnnnnnnnnnnnnnnnnnnnnnnnnnnnnnnnnnnnnnnnnnnnnnnnnnnnnnnnnnnnnnnnnnnnnnnnnnnnnnnnnnnnnnnnnnnnnnnnnnnnnnnnnnnnnnnnnnnnnnnnnnnnnnnnnnnnnnnnnnnnnnnnnnnnnnnnnnnnnnnnnnnnnnnnnnnnnnnnnnnnnnnnnnnnnnnnnnnnnnnnnnnnnnnnnnnnnnnnnnnnnnnnnnnnnnnnnnnnnnnnnnnnnnnnnnnnnnnnnnnnnnnnnnnnnnnnnnnnnnnnnnnnnnnnnnnnnnnnnnnnnnnnnnnnnnnnnnnnnnnnnnnnnnnnnnnnnnnnnnnnnnnnnnnnnnnnnnnnnnnnnnnnnnnnnnnnnnnnnnnnnnnnnnnnnnnnnnnnnnnnnnnnnnnnnnnnnnnnnnnnnnnnnnnnnnnnnnnnnnnnnnnnnnnnnnnnnnnnnnnnnnnnnnnnnnnnnnnnnnnnnnnnnnnnnnnnnnnnnnnnnnnnnnnnnnnnnnnnnnnnnnnnnnnnnnnnnnnnnnnnnnnnnnnnnnnnnnnnnnnnnnnnnnnnnnnnnnnnnnnnnnnnnnnnnnnnnnnnnnnnnnnnnnnnnnnnnnnnnnnnnnnnnnnnnnnnnnnnnnnnnnnnnnnnnnnnnnnnnnnnnnnnnnnnnnnnnnnnnnnnnnnnnnnnnnnnnnnnnnnnnnnnnnnnnnnnnnnnnnnnnnnnnnnnnnnnnnnnnnnnnnnnnnnnnnnnnnnnnnnnnnnnnnnnnnnnnnnnnnnnnnnnnnnnnnnnnnnnnnnnnnnnnnnnnnnnnnnnnnnnnnnnnnnnnnnnnnnnnnnnnnnnnnnnnnnnnnnnnnnnnnnnnnnnnnnnnnnnnnnnnnnnnnnnnnnnnnnnnnnnnnnnnnnnnnnnnnnnnnnnnnnnnnnnnnnnnnnnnnnnnnnnnnnnnnnnnnnnnnnnnnnnnnnnnnnnnnnnnnnnnnnnnnnnnnnnnnnnnnnnnnnnnnnnnnnnnnnnnnnnnnnnnnnnnnnnnnnnnnnnnnnnnnnnnnnnnnnnnnnnnnnnnnnnnnnnnnnnnnnnnnnnnnnnnnnnnnnnnnnnnnnnnnnnnnnnnnnnnnnnnnnnnnnnnnnnnnnnnnnnnnnnnnnnnnnnnnnnnnnnnnnnnnnnnnnnnnnnnnnnnnnnnnnnnnnnnnnnnnnnnnnnnnnnnnnnnnnnnnnnnnnnnnnnnnnnnnnnnnnnnnnnnnnnnnnnnnnnnnnnnnnnnnnnnnnnnnnnnnnnnnnnnnnnnnnnnnnnnnnnnnnnnnnnnnnnnnnnnnnnnnnnnnnnnnnnnnnnnnnnnnnnnnnnnnnnnnnnnnnnnnnnnnnnnnnnnnnnnnnnnnnnnnnnnnnnnnnnnnnnnnnnnnnnnnnnnnnnnnnnnnnnnnnnnnnnnnnnnnnnnnnnnnnnnnnnnnnnnnnnnnnnnnnnnnnnnnnnnnnnnnnnnnnnnnnnnnnnnnnnnnnnnnnnnnnnnnnnnnnnnnnnnnnnnnnnnnnnnnnnnnnnnnnnnnnnnnnnnnnnnnnnnnnnnnnnnnnnnnnnnnnnnnnnnnnnnnnnnnnnnnnnnnnnnnnnnnnnnnnnnnnnnnnnnnnnnnnnnnnnnnnnnnnnnnnnnnnnnnnnnnnnnnnnnnnnnnnnnnnnnnnnnnnnnnnnnnnnnnnnnnnnnnnnnnnnnnnnnnnnnnnnnnnnnnnnnnnnnnnnnnnnnnnnnnnnnnnnnnnnnnnnnnnnnnnnnnnnnnnnnnnnnnnnnnnnnnnnnnnnnnnnnnnnnnnnnnnnnnnnnnnnnnnnnnnnnnnnnnnnnnnnnnnnnnnnnnnnnnnnnnnnnnnnnnnnnnnnnnnnnnnnnnnnnnnnnnnnnnnnnnnnnnnnnnnnnnnnnnnnnnnnnnnnnnnnnnnnnnnnnnnnnnnnnnnnnnnnnnnnnnnnnnnnnnnnnnnnnnnnnnnnnnnnnnnnnnnnnnnnnnnnnnnnnnnnnnnnnnnnnnnnnnnnnnnnnnnnnnnnnnnnnnnnnnnnnnnnnnnnnnnnnnnnnnnnnnnnnnnnnnnnnnnnnnnnnnnnnnnnnnnnnnnnnnnnnnnnnnnnnnnnnnnnnnnnnnnnnnnnnnnnnnnnnnnnnnnnnnnnnnnnnnnnnnnnnnnnnnnnnnnnnnnnnnnnnnnnnnnnnnnnnnnnnnnnnnnnnnnnnnnnnnnnnnnnnnnnnnnnnnnnnnnnnnnnnnnnnnnnnnnnnnnnnnnnnnnnnnnnnnnnnnnnnnnnnnnnnnnnnnnnnnnnnnnnnnnnnnnnnnnnnnnnnnnnnnnnnnnnnnnnnnnnnnnnnnnnnnnnnnnnnnnnnnnnnnnnnnnnnnnnnnnnnnnnnnnnnnnnnnnnnnnnnnnnnnnnnnnnnnnnnnnnnnnnnnnnnnnnnnnnnnnnnnnnnnnnnnnnnnnnnnnnnnnnnnnnnnnnnnnnnnnnnnnnnnnnnnnnnnnnnnnnnnnnnnnnnnnnnnnnnnnnnnnnnnnnnnnnnnnnnnnnnnnnnnnnnnnnnnnnnnnnnnnnnnnnnnnnnnnnnnnnnnnnnnnnnnnnnnnnnnnnnnnnnnnnnnnnnnnnnnnnnnnnnnnnnnnnnnnnnnnnnnnnnnnnnnnnnnnnnnnnnnnnnnnnnnnnnnnnnnnnnnnnnnnnnnnnnnnnnnnnnnnnnnnnnnnnnnnnnnnnnnnnnnnnnnnnnnnnnnnnnnnnnnnnnnnnnnnnnnnnnnnnnnnnnnnnnnnnnnnnnnnnnnnnnnnnnnnnnnnnnnnnnnnnnnnnnnnnnnnnnnnnnnnnnnnnnnnnnnnnnnnnnnnnnnnnnnnnnnnnnnnnnnnnnnnnnnnnnnnnnnnnnnnnnnnnnnnnnnnnnnnnnnnnnnnnnnnnnnnnnnnnnnnnnnnnnnnnnnnnnnnnnnnnnnnnnnnnnnnnnnnnnnnnnnnnnnnnnnnnnnnnnnnnnnnnnnnnnnnnnnnnnnnnnnnnnnnnnnnnnnnnnnnnnnnnnnnnnnnnnnnnnnnnnnnnnnnnnnnnnnnnnnnnnnnnnnnnnnnnnnnnnnnnnnnnnnnnnnnnnnnnnnnnnnnnnnnnnnnnnnnnnnnnnnnnnnnnnnnnnnnnnnnnnnnnnnnnnnnnnnnnnnnnnnnnnnnnnnnnnnnnnnnnnnnnnnnnnnnnnnnnnnnnnnnnnnnnnnnnnnnnnnnnnnnnnnnnnnnnnnnnnnnnnnnnnnnnnnnnnnnnnnnnnnnnnnnnnnnnnnnnnnnnnnnnnnnnnnnnnnnnnnnnnnnnnnnnnnnnnnnnnnnnnnnnnnnnnnnnnnnnnnnnnnnnnnnnnnnnnnnnnnnnnnnnnnnnnnnnnnnnnnnnnnnnnnnnnnnnnnnnnnnnnnnnnnnnnnnnnnnnnnnnnnnnnnnnnnnnnnnnnnnnnnnnnnnnnnnnnnnnnnnnnnnnnnnnnnnnnnnnnnnnnnnnnnnnnnnnnnnnnnnnnnnnnnnnnnnnnnnnnnnnnnnnnnnnnnnnnnnnnnnnnnnnnnnnnnnnnnnnnnnnnnnnnnnnnnnnnnnnnnnnnnnnnnnnnnnnnnnnnnnnnnnnnnnnnnnnnnnnnnnnnnnnnnnnnnnnnnnnnnnnnnnnnnnnnnnnnnnnnnnnnnnnnnnnnnnnnnnnnnnnnnnnnnnnnnnnnnnnnnnnnnnnnnnnnnnnnnnnnnnnnnnnnnnnnnnnnnnnnnnnnnnnnnnnnnnnnnnnnnnnnnnnnnnnnnnnnnnnnnnnnnnnnnnnnnnnnnnnnnnnnnnnnnnnnnnnnnnnnnnnnnnnnnnnnnnnnnnnnnnnnnnnnnnnnnnnnnnnnnnnnnnnnnnnnnnnnnnnnnnnnnnnnnnnnnnnnnnnnnnnnnnnnnnnnnnnnnnnnnnnnnnnnnnnnnnnnnnnnnnnnnnnnnnnnnnnnnnnnnnnnnnnnnnnnnnnnnnnnnnnnnnnnnnnnnnnnnnnnnnnnnnnnnnnnnnnnnnnnnnnnnnnnnnnnnnnnnnnnnnnnnnnnnnnnnnnnnnnnnnnnnnnnnnnnnnnnnnnnnnnnnnnnnnnnnnnnnnnnnnnnnnnnnnnnnnnnnnnnnnnnnnnnnnnnnnnnnnnnnnnnnnnnnnnnnnnnnnnnnnnnnnnnnnnnnnnnnnnnnnnnnnnnnnnnnnnnnnnnnnnnnnnnnnnnnnnnnnnnnnnnnnnnnnnnnnnnnnnnnnnnnnnnnnnnnnnnnnnnnnnnnnnnnnnnnnnnnnnnnnnnnnnnnnnnnnnnnnnnnnnnnnnnnnnnnnnnnnnnnnnnnnnnnnnnnnnnnnnnnnnnnnnnnnnnnnnnnnnnnnnnnnnnnnnnnnnnnnnnnnnnnnnnnnnnnnnnnnnnnnnnnnnnnnnnnnnnnnnnnnnnnnnnnnnnnnnnnnnnnnnnnnnnnnnnnnnnnnnnnnnnnnnnnnnnnnnnnnnnnnnnnnnnnnnnnnnnnnnnnnnnnnnnnnnnnnnnnnnnnnnnnnnnnnnnnnnnnnnnnnnnnnnnnnnnnnnnnnnnnnnnnnnnnnnnnnnnnnnnnnnnnnnnnnnnnnnnnnnnnnnnnnnnnnnnnnnnnnnnnnnnnnnnnnnnnnnnnnnnnnnnnnnnnnnnnnnnnnnnnnnnnnnnnnnnnnnnnnnnnnnnnnnnnnnnnnnnnnnnnnnnnnnnnnnnnnnnnnnnnnnnnnnnnnnnnnnnnnnnnnnnnnnnnnnnnnnnnnnnnnnnnnnnnnnnnnnnnnnnnnnnnnnnnnnnnnnnnnnnnnnnnnnnnnnnnnnnnnnnnnnnnnnnnnnnnnnnnnnnnnnnnnnnnnnnnnnnnnnnnnnnnnnnnnnnnnnnnnnnnnnnnnnnnnnnnnnnnnnnnnnnnnnnnnnnnnnnnnnnnnnnnnnnnnnnnnnnnnnnnnnnnnnnnnnnnnnnnnnnnnnnnnnnnnnnnnnnnnnnnnnnnnnnnnnnnnnnnnnnnnnnnnnnnnnnnnnnnnnnnnnnnnnnnnnnnnnnnnnnnnnnnnnnnnnnnnnnnnnnnnnnnnnnnnnnnnnnnnnnnnnnnnnnnnnnnnnnnnnnnnnnnnnnnnnnnnnnnnnnnnnnnnnnnnnnnnnnnnnnnnnnnnnnnnnnnnnnnnnnnnnnnnnnnnnnnnnnnnnnnnnnnnnnnnnnnnnnnnnnnnnnnnnnnnnnnnnnnnnnnnnnnnnnnnnnnnnnnnnnnnnnnnnnnnnnnnnnnnnnnnnnnnnnnnnnnnnnnnnnnnnnnnnnnnnnnnnnnnnnnnnnnnnnnnnnnnnnnnnnnnnnnnnnnnnnnnnnnnnnnnnnnnnnnnnnnnnnnnnnnnnnnnnnnnnnnnnnnnnnnnnnnnnnnnnnnnnnnnnnnnnnnnnnnnnnnnnnnnnnnnnnnnnnnnnnnnnnnnnnnnnnnnnnnnnnnnnnnnnnnnnnnnnnnnnnnnnnnnnnnnnnnnnnnnnnnnnnnnnnnnnnnnnnnnnnnnnnnnnnnnnnnnnnnnnnnnnnnnnnnnnnnnnnnnnnnnnnnnnnnnnnnnnnnnnnnnnnnnnnnnnnnnnnnnnnnnnnnnnnnnnnnnnnnnnnnnnnnnnnnnnnnnnnnnnnnnnnnnnnnnnnnnnnnnnnnnnnnnnnnnnnnnnnnnnnnnnnnnnnnnnnnnnnnnnnnnnnnnnnnnnnnnnnnnnnnnnnnnnnnnnnnnnnnnnnnnnnnnnnnnnnnnnnnnnnnnnnnnnnnnnnnnnnnnnnnnnnnnnnnnnnnnnnnnnnnnnnnnnnnnnnnnnnnnnnnnnnnnnnnnnnnnnnnnnnnnnnnnnnnnnnnnnnnnnnnnnnnnnnnnnnnnnnnnnnnnnnnnnnnnnnnnnnnnnnnnnnnnnnnnnnnnnnnnnnnnnnnnnnnnnnnnnnnnnnnnnnnnnnnnnnnnnnnnnnnnnnnnnnnnnnnnnnnnnnnnnnnnnnnnnnnnnnnnnnnnnnnnnnnnnnnnnnnnnnnnnnnnnnnnnnnnnnnnnnnnnnnnnnnnnnnnnnnnnnnnnnnnnnnnnnnnnnnnnnnnnnnnnnnnnnnnnnnnnnnnnnnnnnnnnnnnnnnnnnnnnnnnnnnnnnnnnnnnnnnnnnnnnnnnnnnnnnnnnnnnnnnnnnnnnnnnnnnnnnnnnnnnnnnnnnnnnnnnnnnnnnnnnnnnnnnnnnnnnnnnnnnnnnnnnnnnnnnnnnnnnnnnnnnnnnnnnnnnnnnnnnnnnnnnnnnnnnnnnnnnnnnnnnnnnnnnnnnnnnnnnnnnnnnnnnnnnnnnnnnnnnnnnnnnnnnnnnnnnnnnnnnnnnnnnnnnnnnnnnnnnnnnnnnnnnnnnnnnnnnnnnnnnnnnnnnnnnnnnnnnnnnnnnnnnnnnnnnnnnnnnnnnnnnnnnnnnnnnnnnnnnnnnnnnnnnnnnnnnnnnnnnnnnnnnnnnnnnnnnnnnnnnnnnnnnnnnnnnnnnnnnnnnnnnnnnnnnnnnnnnnnnnnnnnnnnnnnnnnnnnnnnnnnnnnnnnnnnnnnnnnnnnnnnnnnnnnnnnnnnnnnnnnnnnnnnnnnnnnnnnnnnnnnnnnnnnnnnnnnnnnnnnnnnnnnnnnnnnnnnnnnnnnnnnnnnnnnnnnnnnnnnnnnnnnnnnnnnnnnnnnnnnnnnnnnnnnnnnnnnnnnnnnnnnnnnnnnnnnnnnnnnnnnnnnnnnnnnnnnnnnnnnnnnnnnnnnnnnnnnnnnnnnnnnnnnnnnnnnnnnnnnnnnnnnnnnnnnnnnnnnnnnnnnnnnnnnnnnnnnnnnnnnnnnnnnnnnnnnnnnnnnnnnnnnnnnnnnnnnnnnnnnnnnnnnnnnnnnnnnnnnnnnnnnnnnnnnnnnnnnnnnnnnnnnnnnnnnnnnnnnnnnnnnnnnnnnnnnnnnnnnnnnnnnnnnnnnnnnnnnnnnnnnnnnnnnnnnnnnnnnnnnnnnnnnnnnnnnnnnnnnnnnnnnnnnnnnnnnnnnnnnnnnnnnnnnnnnnnnnnnnnnnnnnnnnnnnnnnnnnnnnnnnnnnnnnnnnnnnnnnnnnnnnnnnnnnnnnnnnnnnnnnnnnnnnnnnnnnnnnnnnnnnnnnnnnnnnnnnnnnnnnnnnnnnnnnnnnnnnnnnnnnnnnnnnnnnnnnnnnnnnnnnnnnnnnnnnnnnnnnnnnnnnnnnnnnnnnnnnnnnnnnnnnnnnnnnnnnnnnnnnnnnnnnnnnnnnnnnnnnnnnnnnnnnnnnnnnnnnnnnnnnnnnnnnnnnnnnnnnnnnnnnnnnnnnnnnnnnnnnnnnnnnnnnnnnnnnnnnnnnnnnnnnnnnnnnnnnnnnnnnnnnnnnnnnnnnnnnnnnnnnnnnnnnnnnnnnnnnnnnnnnnnnnnnnnnnnnnnnnnnnnnnnnnnnnnnnnnnnnnnnnnnnnnnnnnnnnnnnnnnnnnnnnnnnnnnnnnnnnnnnnnnnnnnnnnnnnnnnnnnnnnnnnnnnnnnnnnnnnnnnnnnnnnnnnnnnnnnnnnnnnnnnnnnnnnnnnnnnnnnnnnnnnnnnnnnnnnnnnnnnnnnnnnnnnnnnnnnnnnnnnnnnnnnnnnnnnnnnnnnnnnnnnnnnnnnnnnnnnnnnnnnnnnnnnnnnnnnnnnnnnnnnnnnnnnnnnnnnnnnnnnnnnnnnnnnnnnnnnnnnnnnnnnnnnnnnnnnnnnnnnnnnnnnnnnnnnnnnnnnnnnnnnnnnnnnnnnnnnnnnnnnnnnnnnnnnnnnnnnnnnnnnnnnnnnnnnnnnnnnnnnnnnnnnnnnnnnnnnnnnnnnnnnnnnnnnnnnnnnnnnnnnnnnnnnnnnnnnnnnnnnnnnnnnnnnnnnnnnnnnnnnnnnnnnnnnnnnnnnnnnnnnnnnnnnnnnnnnnnnnnnnnnnnnnnnnnnnnnnnnnnnnnnnnnnnnnnnnnnnnnnnnnnnnnnnnnnnnnnnnnnnnnnnnnnnnnnnnnnnnnnnnnnnnnnnnnnnnnnnnnnnnnnnnnnnnnnnnnnnnnnnnnnnnnnnnnnnnnnnnnnnnnnnnnnnnnnnnnnnnnnnnnnnnnnnnnnnnnnnnnnnnnnnnnnnnnnnnnnnnnnnnnnnnnnnnnnnnnnnnnnnnnnnnnnnnnnnnnnnnnnnnnnnnnnnnnnnnnnnnnnnnnnnnnnnnnnnnnnnnnnnnnnnnnnnnnnnnnnnnnnnnnnnnnnnnnnnnnnnnnnnnnnnnnnnnnnnnnnnnnnnnnnnnnnnnnnnnnnnnnnnnnnnnnnnnnnnnnnnnnnnnnnnnnnnnnnnnnnnnnnnnnnnnnnnnnnnnnnnnnnnnnnnnnnnnnnnnnnnnnnnnnnnnnnnnnnnnnnnnnnnnnnnnnnnnnnnnnnnnnnnnnnnnnnnnnnnnnnnnnnnnnnnnnnnnnnnnnnnnnnnnnnnnnnnnnnnnnnnnnnnnnnnnnnnnnnnnnnnnnnnnnnnnnnnnnnnnnnnnnnnnnnnnnnnnnnnnnnnnnnnnnnnnnnnnnnnnnnnnnnnnnnnnnnnnnnnnnnnnnnnnnnnnnnnnnnnnnnnnnnnnnnnnnnnnnnnnnnnnnnnnnnnnnnnnnnnnnnnnnnnnnnnnnnnnnnnnnnnnnnnnnnnnnnnnnnnnnnnnnnnnnnnnnnnnnnnnnnnnnnnnnnnnnnnnnnnnnnnnnnnnnnnnnnnnnnnnnnnnnnnnnnnnnnnnnnnnnnnnnnnnnnnnnnnnnnnnnnnnnnnnnnnnnnnnnnnnnnnnnnnnnnnnnnnnnnnnnnnnnnnnnnnnnnnnnnnnnnnnnnnnnnnnnnnnnnnnnnnnnnnnnnnnnnnnnnnnnnnnnnnnnnnnnnnnnnnnnnnnnnnnnnnnnnnnnnnnnnnnnnnnnnnnnnnnnnnnnnnnnnnnnnnnnnnnnnnnnnnnnnnnnnnnnnnnnnnnnnnnnnnnnnnnnnnnnnnnnnnnnnnnnnnnnnnnnnnnnnnnnnnnnnnnnnnnnnnnnnnnnnnnnnnnnnnnnnnnnnnnnnnnnnnnnnnnnnnnnnnnnnnnnnnnnnnnnnnnnnnnnnnnnnnnnnnnnnnnnnnnnnnnnnnnnnnnnnnnnnnnnnnnnnnnnnnnnnnnnnnnnnnnnnnnnnnnnnnnnnnnnnnnnnnnnnnnnnnnnnnnnnnnnnnnnnnnnnnnnnnnnnnnnnnnnnnnnnnnnnnnnnnnnnnnnnnnnnnnnnnnnnnnnnnnnnnnnnnnnnnnnnnnnnnnnnnnnnnnnnnnnnnnnnnnnnnnnnnnnnnnnnnnnnnnnnnnnnnnnnnnnnnnnnnnnnnnnnnnnnnnnnnnnnnnnnnnnnnnnnnnnnnnnnnnnnnnnnnnnnnnnnnnnnnnnnnnnnnnnnnnnnnnnnnnnnnnnnnnnnnnnnnnnnnnnnnnnnnnnnnnnnnnnnnnnnnnnnnnnnnnnnnnnnnnnnnnnnnnnnnnnnnnnnnnnnnnnnnnnnnnnnnnnnnnnnnnnnnnnnnnnnnnnnnnnnnnnnnnnnnnnnnnnnnnnnnnnnnnnnnnnnnnnnnnnnnnnnnnnnnnnnnnnnnnnnnnnnnnnnnnnnnnnnnnnnnnnnnnnnnnnnnnnnnnnnnnnnnnnnnnnnnnnnnnnnnnnnnnnnnnnnnnnnnnnnnnnnnnnnnnnnnnnnnnnnnnnnnnnnnnnnnnnnnnnnnnnnnnnnnnnnnnnnnnnnnnnnnnnnnnnnnnnnnnnnnnnnnnnnnnnnnnnnnnnnnnnnnnnnnnnnnnnnnnnnnnnnnnnnnnnnnnnnnnnnnnnnnnnnnnnnnnnnnnnnnnnnnnnnnnnnnnnnnnnnnnnnnnnnnnnnnnnnnnnnnnnnnnnnnnnnnnnnnnnnnnnnnnnnnnnnnnnnnnnnnnnnnnnnnnnnnnnnnnnnnnnnnnnnnnnnnnnnnnnnnnnnnnnnnnnnnnnnnnnnnnnnnnnnnnnnnnnnnnnnnnnnnnnnnnnnnnnnnnnnnnnnnnnnnnnnnnnnnnnnnnnnnnnnnnnnnnnnnnnnnnnnnnnnnnnnnnnnnnnnnnnnnnnnnnnnnnnnnnnnnnnnnnnnnnnnnnnnnnnnnnnnnnnnnnnnnnnnnnnnnnnnnnnnnnnnnnnnnnnnnnnnnnnnnnnnnnnnnnnnnnnnnnnnnnnnnnnnnnnnnnnnnnnnnnnnnnnnnnnnnnnnnnnnnnnnnnnnnnnnnnnnnnnnnnnnnnnnnnnnnnnnnnnnnnnnnnnnnnnnnnnnnnnnnnnnnnnnnnnnnnnnnnnnnnnnnnnnnnnnnnnnnnnnnnnnnnnnnnnnnnnnnnnnnnnnnnnnnnnnnnnnnnnnnnnnnnnnnnnnnnnnnnnnnnnnnnnnnnnnnnnnnnnnnnnnnnnnnnnnnnnnnnnnnnnnnnnnnnnnnnnnnnnnnnnnnnnnnnnnnnnnnnnnnnnnnnnnnnnnnnnnnnnnnnnnnnnnnnnnnnnnnnnnnnnnnnnnnnnnnnnnnnnnnnnnnnnnnnnnnnnnnnnnnnnnnnnnnnnnnnnnnnnnnnnnnnnnnnnnnnnnnnnnnnnnnnnnnnnnnnnnnnnnnnnnnnnnnnnnnnnnnnnnnnnnnnnnnnnnnnnnnnnnnnnnnnnnnnnnnnnnnnnnnnnnnnnnnnnnnnnnnnnnnnnnnnnnnnnnnnnnnnnnnnnnnnnnnnnnnnnnnnnnnnnnnnnnnnnnnnnnnnnnnnnnnnnnnnnnnnnnnnnnnnnnnnnnnnnnnnnnnnnnnnnnnnnnnnnnnnnnnnnnnnnnnnnnnnnnnnnnnnnnnnnnnnnnnnnnnnnnnnnnnnnnnnnnnnnnnnnnnnnnnnnnnnnnnnnnnnnnnnnnnnnnnnnnnnnnnnnnnnnnnnnnnnnnnnnnnnnnnnnnnnnnnnnnnnnnnnnnnnnnnnnnnnnnnnnnnnnnnnnnnnnnnnnnnnnnnnnnnnnnnnnnnnnnnnnnnnnnnnnnnnnnnnnnnnnnnnnnnnnnnnnnnnnnnnnnnnnnnnnnnnnnnnnnnnnnnnnnnnnnnnnnnnnnnnnnnnnnnnnnnnnnnnnnnnnnnnnnnnnnnnnnnnnnnnnnnnnnnnnnnnnnnnnnnnnnnnnnnnnnnnnnnnnnnnnnnnnnnnnnnnnnnnnnnnnnnnnnnnnnnnnnnnnnnnnnnnnnnnnnnnnnnnnnnnnnnnnnnnnnnnnnnnnnnnnnnnnnnnnnnnnnnnnnnnnnnnnnnnnnnnnnnnnnnnnnnnnnnnnnnnnnnnnnnnnnnnnnnnnnnnnnnnnnnnnnnnnnnnnnnnnnnnnnnnnnnnnnnnnnnnnnnnnnnnnnnnnnnnnnnnnnnnnnnnnnnnnnnnnnnnnnnnnnnnnnnnnnnnnnnnnnnnnnnnnnnnnnnnnnnnnnnnnnnnnnnnnnnnnnnnnnnnnnnnnnnnnnnnnnnnnnnnnnnnnnnnnnnnnnnnnnnnnnnnnnnnnnnnnnnnnnnnnnnnnnnnnnnnnnnnnnnnnnnnnnnnnnnnnnnnnnnnnnnnnnnnnnnnnnnnnnnnnnnnnnnnnnnnnnnnnnnnnnnnnnnnnnnnnnnnnnnnnnnnnnnnnnnnnnnnnnnnnnnnnnnnnnnnnnnnnnnnnnnnnnnnnnnnnnnnnnnnnnnnnnnnnnnnnnnnnnnnnnnnnnnnnnnnnnnnnnnnnnnnnnnnnnnnnnnnnnnnnnnnnnnnnnnnnnnnnnnnnnnnnnnnnnnnnnnnnnnnnnnnnnnnnnnnnnnnnnnnnnnnnnnnnnnnnnnnnnnnnnnnnnnnnnnnnnnnnnnnnnnnnnnnnnnnnnnnnnnnnnnnnnnnnnnnnnnnnnnnnnnnnnnnnnnnnnnnnnnnnnnnnnnnnnnnnnnnnnnnnnnnnnnnnnnnnnnnnnnnnnnnnnnnnnnnnnnnnnnnnnnnnnnnnnnnnnnnnnnnnnnnnnnnnnnnnnnnnnnnnnnnnnnnnnnnnnnnnnnnnnnnnnnnnnnnnnnnnnnnnnnnnnnnnnnnnnnnnnnnnnnnnnnnnnnnnnnnnnnnnnnnnnnnnnnnnnnnnnnnnnnnnnnnnnnnnnnnnnnnnnnnnnnnnnnnnnnnnnnnnnnnnnnnnnnnnnnnnnnnnnnnnnnnnnnnnnnnnnnnnnnnnnnnnnnnnnnnnnnnnnnnnnnnnnnnnnnnnnnnnnnnnnnnnnnnnnnnnnnnnnnnnnnnnnnnnnnnnnnnnnnnnnnnnnnnnnnnnnnnnnnnnnnnnnnnnnnnnnnnnnnnnnnnnnnnnnnnnnnnnnnnnnnnnnnnnnnnnnnnnnnnnnnnnnnnnnnnnnnnnnnnnnnnnnnnnnnnnnnnnnnnnnnnnnnnnnnnnnnnnnnnnnnnnnnnnnnnnnnnnnnnnnnnnnnnnnnnnnnnnnnnnnnnnnnnnnnnnnnnnnnnnnnnnnnnnnnnnnnnnnnnnnnnnnnnnnnnnnnnnnnnnnnnnnnnnnnnnnnnnnnnnnnnnnnnnnnnnnnnnnnnnnnnnnnnnnnnnnnnnnnnnnnnnnnnnnnnnnnnnnnnnnnnnnnnnnnnnnnnnnnnnnnnnnnnnnnnnnnnnnnnnnnnnnnnnnnnnnnnnnnnnnnnnnnnnnnnnnnnnnnnnnnnnnnnnnnnnnnnnnnnnnnnnnnnnnnnnnnnnnnnnnnnnnnnnnnnnnnnnnnnnnnnnnnnnnnnnnnnnnnnnnnnnnnnnnnnnnnnnnnnnnnnnnnnnnnnnnnnnnnnnnnnnnnnnnnnnnnnnnnnnnnnnnnnnnnnnnnnnnnnnnnnnnnnnnnnnnnnnnnnnnnnnnnnnnnnnnnnnnnnnnnnnnnnnnnnnnnnnnnnnnnnnnnnnnnnnnnnnnnnnnnnnnnnnnnnnnnnnnnnnnnnnnnnnnnnnnnnnnnnnnnnnnnnnnnnnnnnnnnnnnnnnnnnnnnnnnnnnnnnnnnnnnnnnnnnnnnnnnnnnnnnnnnnnnnnnnnnnnnnnnnnnnnnnnnnnnnnnnnnnnnnnnnnnnnnnnnnnnnnnnnnnnnnnnnnnnnnnnnnnnnnnnnnnnnnnnnnnnnnnnnnnnnnnnnnnnnnnnnnnnnnnnnnnnnnnnnnnnnnnnnnnnnnnnnnnnnnnnnnnnnnnnnnnnnnnnnnnnnnnnnnnnnnnnnnnnnnnnnnnnnnnnnnnnnnnnnnnnnnnnnnnnnnnnnnnnnnnnnnnnnnnnnnnnnnnnnnnnnnnnnnnnnnnnnnnnnnnnnnnnnnnnnnnnnnnnnnnnnnnnnnnnnnnnnnnnnnnnnnnnnnnnnnnnnnnnnnnnnnnnnnnnnnnnnnnnnnnnnnnnnnnnnnnnnnnnnnnnnnnnnnnnnnnnnnnnnnnnnnnnnnnnnnnnnnnnnnnnnnnnnnnnnnnnnnnnnnnnnnnnnnnnnnnnnnnnnnnnnnnnnnnnnnnnnnnnnnnnnnnnnnnnnnnnnnnnnnnnnnnnnnnnnnnnnnnnnnnnnnnnnnnnnnnnnnnnnnnnnnnnnnnnnnnnnnnnnnnnnnnnnnnnnnnnnnnnnnnnnnnnnnnnnnnnnnnnnnnnnnnnnnnnnnnnnnnnnnnnnnnnnnnnnnnnnnnnnnnnnnnnnnnnnnnnnnnnnnnnnnnnnnnnnnnnnnnnnnnnnnnnnnnnnnnnnnnnnnnnnnnnnnnnnnnnnnnnnnnnnnnnnnnnnnnnnnnnnnnnnnnnnnnnnnnnnnnnnnnnnnnnnnnnnnnnnnnnnnnnnnnnnnnnnnnnnnnnnnnnnnnnnnnnnnnnnnnnnnnnnnnnnnnnnnnnnnnnnnnnnnnnnnnnnnnnnnnnnnnnnnnnnnnnnnnnnnnnnnnnnnnnnnnnnnnnnnnnnnnnnnnnnnnnnnnnnnnnnnnnnnnnnnnnnnnnnnnnnnnnnnnnnnnnnnnnnnnnnnnnnnnnnnnnnnnnnnnnnnnnnnnnnnnnnnnnnnnnnnnnnnnnnnnnnnnnnnnnnnnnnnnnnnnnnnnnnnnnnnnnnnnnnnnnnnnnnnnnnnnnnnnnnnnnnnnnnnnnnnnnnnnnnnnnnnnnnnnnnnnnnnnnnnnnnnnnnnnnnnnnnnnnnnnnnnnnnnnnnnnnnnnnnnnnnnnnnnnnnnnnnnnnnnnnnnnnnnnnnnnnnnnnnnnnnnnnnnnnnnnnnnnnnnnnnnnnnnnnnnnnnnnnnnnnnnnnnnnnnnnnnnnnnnnnnnnnnnnnnnnnnnnnnnnnnnnnnnnnnnnnnnnnnnnnnnnnnnnnnnnnnnnnnnnnnnnnnnnnnnnnnnnnnnnnnnnnnnnnnnnnnnnnnnnnnnnnnnnnnnnnnnnnnnnnnnnnnnnnnnnnnnnnnnnnnnnnnnnnnnnnnnnnnnnnnnnnnnnnnnnnnnnnnnnnnnnnnnnnnnnnnnnnnnnnnnnnnnnnnnnnnnnnnnnnnnnnnnnnnnnnnnnnnnnnnnnnnnnnnnnnnnnnnnnnnnnnnnnnnnnnnnnnnnnnnnnnnnnnnnnnnnnnnnnnnnnnnnnnnnnnnnnnnnnnnnnnnnnnnnnnnnnnnnnnnnnnnnnnnnnnnnnnnnnnnnnnnnnnnnnnnnnnnnnnnnnnnnnnnnnnnnnnnnnnnnnnnnnnnnnnnnnnnnnnnnnnnnnnnnnnnnnnnnnnnnnnnnnnnnnnnnnnnnnnnnnnnnnnnnnnnnnnnnnnnnnnnnnnnnnnnnnnnnnnnnnnnnnnnnnnnnnnnnnnnnnnnnnnnnnnnnnnnnnnnnnnnnnnnnnnnnnnnnnnnnnnnnnnnnnnnnnnnnnnnnnnnnnnnnnnnnnnnnnnnnnnnnnnnnnnnnnnnnnnnnnnnnnnnnnnnnnnnnnnnnnnnnnnnnnnnnnnnnnnnnnnnnnnnnnnnnnnnnnnnnnnnnnnnnnnnnnnnnnnnnnnnnnnnnnnnnnnnnnnnnnnnnnnnnnnnnnnnnnnnnnnnnnnnnnnnnnnnnnnnnnnnnnnnnnnnnnnnnnnnnnnnnnnnnnnnnnnnnnnnnnnnnnnnnnnnnnnnnnnnnnnnnnnnnnnnnnnnnnnnnnnnnnnnnnnnnnnnnnnnnnnnnnnnnnnnnnnnnnnnnnnnnnnnnnnnnnnnnnnnnnnnnnnnnnnnnnnnnnnnnnnnnnnnnnnnnnnnnnnnnnnnnnnnnnnnnnnnnnnnnnnnnnnnnnnnnnnnnnnnnnnnnnnnnnnnnnnnnnnnnnnnnnnnnnnnnnnnnnnnnnnnnnnnnnnnnnnnnnnnnnnnnnnnnnnnnnnnnnnnnnnnnnnnnnnnnnnnnnnnnnnnnnnnnnnnnnnnnnnnnnnnnnnnnnnnnnnnnnnnnnnnnnnnnnnnnnnnnnnnnnnnnnnnnnnnnnnnnnnnnnnnnnnnnnnnnnnnnnnnnnnnnnnnnnnnnnnnnnnnnnnnnnnnnnnnnnnnnnnnnnnnnnnnnnnnnnnnnnnnnnnnnnnnnnnnnnnnnnnnnnnnnnnnnnnnnnnnnnnnnnnnnnnnnnnnnnnnnnnnnnnnnnnnnnnnnnnnnnnnnnnnnnnnnnnnnnnnnnnnnnnnnnnnnnnnnnnnnnnnnnnnnnnnnnnnnnnnnnnnnnnnnnnnnnnnnnnnnnnnnnnnnnnnnnnnnnnnnnnnnnnnnnnnnnnnnnnnnnnnnnnnnnnnnnnnnnnnnnnnnnnnnnnnnnnnnnnnnnnnnnnnnnnnnnnnnnnnnnnnnnnnnnnnnnnnnnnnnnnnnnnnnnnnnnnnnnnnnnnnnnnnnnnnnnnnnnnnnnnnnnnnnnnnnnnnnnnnnnnnnnnnnnnnnnnnnnnnnnnnnnnnnnnnnnnnnnnnnnnnnnnnnnnnnnnnnnnnnnnnnnnnnnnnnnnnnnnnnnnnnnnnnnnnnnnnnnnnnnnnnnnnnnnnnnnnnnnnnnnnnnnnnnnnnnnnnnnnnnnnnnnnnnnnnnnnnnnnnnnnnnnnnnnnnnnnnnnnnnnnnnnnnnnnnnnnnnnnnnnnnnnnnnnnnnnnnnnnnnnnnnnnnnnnnnnnnnnnnnnnnnnnnnnnnnnnnnnnnnnnnnnnnnnnnnnnnnnnnnnnnnnnnnnnnnnnnnnnnnnnnnnnnnnnnnnnnnnnnnnnnnnnnnnnnnnnnnnnnnnnnnnnnnnnnnnnnnnnnnnnnnnnnnnnnnnnnnnnnnnnnnnnnnnnnnnnnnnnnnnnnnnnnnnnnnnnnnnnnnnnnnnnnnnnnnnnnnnnnnnnnnnnnnnnnnnnnnnnnnnnnnnnnnnnnnnnnnnnnnnnnnnnnnnnnnnnnnnnnnnnnnnnnnnnnnnnnnnnnnnnnnnnnnnnnnnnnnnnnnnnnnnnnnnnnnnnnnnnnnnnnnnnnnnnnnnnnnnnnnnnnnnnnnnnnnnnnnnnnnnnnnnnnnnnnnnnnnnnnnnnnnnnnnnnnnnnnnnnnnnnnnnnnnnnnnnnnnnnnnnnnnnnnnnnnnnnnnnnnnnnnnnnnnnnnnnnnnnnnnnnnnnnnnnnnnnnnnnnnnnnnnnnnnnnnnnnnnnnnnnnnnnnnnnnnnnnnnnnnnnnnnnnnnnnnnnnnnnnnnnnnnnnnnnnnnnnnnnnnnnnnnnnnnnnnnnnnnnnnnnnnnnnnnnnnnnnnnnnnnnnnnnnnnnnnnnnnnnnnnnnnnnnnnnnnnnnnnnnnnnnnnnnnnnnnnnnnnnnnnnnnnnnnnnnnnnnnnnnnnnnnnnnnnnnnnnnnnnnnnnnnnnnnnnnnnnnnnnnnnnnnnnnnnnnnnnnnnnnnnnnnnnnnnnnnnnnnnnnnnnnnnnnnnnnnnnnnnnnnnnnnnnnnnnnnnnnnnnnnnnnnnnnnnnnnnnnnnnnnnnnnnnnnnnnnnnnnnnnnnnnnnnnnnnnnnnnnnnnnnnnnnnnnnnnnnnnnnnnnnnnnnnnnnnnnnnnnnnnnnnnnnnnnnnnnnnnnnnnnnnnnnnnnnnnnnnnnnnnnnnnnnnnnnnnnnnnnnnnnnnnnnnnnnnnnnnnnnnnnnnnnnnnnnnnnnnnnnnnnnnnnnnnnnnnnnnnnnnnnnnnnnnnnnnnnnnnnnnnnnnnnnnnnnnnnnnnnnnnnnnnnnnnnnnnnnnnnnnnnnnnnnnnnnnnnnnnnnnnnnnnnnnnnnnnnnnnnnnnnnnnnnnnnnnnnnnnnnnnnnnnnnnnnnnnnnnnnnnnnnnnnnnnnnnnnnnnnnnnnnnnnnnnnnnnnnnnnnnnnnnnnnnnnnnnnnnnnnnnnnnnnnnnnnnnnnnnnnnnnnnnnnnnnnnnnnnnnnnnnnnnnnnnnnnnnnnnnnnnnnnnnnnnnnnnnnnnnnnnnnnnnnnnnnnnnnnnnnnnnnnnnnnnnnnnnnnnnnnnnnnnnnnnnnnnnnnnnnnnnnnnnnnnnnnnnnnnnnnnnnnnnnnnnnnnnnnnnnnnnnnnnnnnnnnnnnnnnnnnnnnnnnnnnnnnnnnnnnnnnnnnnnnnnnnnnnnnnnnnnnnnnnnnnnnnnnnnnnnnnnnnnnnnnnnnnnnnnnnnnnnnnnnnnnnnnnnnnnnnnnnnnnnnnnnnnnnnnnnnnnnnnnnnnnnnnnnnnnnnnnnnnnnnnnnnnnnnnnnnnnnnnnnnnnnnnnnnnnnnnnnnnnnnnnnnnnnnnnnnnnnnnnnnnnnnnnnnnnnnnnnnnnnnnnnnnnnnnnnnnnnnnnnnnnnnnnnnnnnnnnnnnnnnnnnnnnnnnnnnnnnnnnnnnnnnnnnnnnnnnnnnnnnnnnnnnnnnnnnnnnnnnnnnnnnnnnnnnnnnnnnnnnnnnnnnnnnnnnnnnnnnnnnnnnnnnnnnnnnnnnnnnnnnnnnnnnnnnnnnnnnnnnnnnnnnnnnnnnnnnnnnnnnnnnnnnnnnnnnnnnnnnnnnnnnnnnnnnnnnnnnnnnnnnnnnnnnnnnnnnnnnnnnnnnnnnnnnnnnnnnnnnnnnnnnnnnnnnnnnnnnnnnnnnnnnnnnnnnnnnnnnnnnnnnnnnnnnnnnnnnnnnnnnnnnnnnnnnnnnnnnnnnnnnnnnnnnnnnnnnnnnnnnnnnnnnnnnnnnnnnnnnnnnnnnnnnnnnnnnnnnnnnnnnnnnnnnnnnnnnnnnnnnnnnnnnnnnnnnnnnnnnnnnnnnnnnnnnnnnnnnnnnnnnnnnnnnnnnnnnnnnnnnnnnnnnnnnnnnnnnnnnnnnnnnnnnnnnnnnnnnnnnnnnnnnnnnnnnnnnnnnnnnnnnnnnnnnnnnnnnnnnnnnnnnnnnnnnnnnnnnnnnnnnnnnnnnnnnnnnnnnnnnnnnnnnnnnnnnnnnnnnnnnnnnnnnnnnnnnnnnnnnnnnnnnnnnnnnnnnnnnnnnnnnnnnnnnnnnnnnnnnnnnnnnnnnnnnnnnnnnnnnnnnnnnnnnnnnnnnnnnnnnnnnnnnnnnnnnnnnnnnnnnnnnnnnnnnnnnnnnnnnnnnnnnnnnnnnnnnnnnnnnnnnnnnnnnnnnnnnnnnnnnnnnnnnnnnnnnnnnnnnnnnnnnnnnnnnnnnnnnnnnnnnnnnnnnnnnnnnnnnnnnnnnnnnnnnnnnnnnnnnnnnnnnnnnnnnnnnnnnnnnnnnnnnnnnnnnnnnnnnnnnnnnnnnnnnnnnnnnnnnnnnnnnnnnnnnnnnnnnnnnnnnnnnnnnnnnnnnnnnnnnnnnnnnnnnnnnnnnnnnnnnnnnnnnnnnnnnnnnnnnnnnnnnnnnnnnnnnnnnnnnnnnnnnnnnnnnnnnnnnnnnnnnnnnnnnnnnnnnnnnnnnnnnnnnnnnnnnnnnnnnnnnnnnnnnnnnnnnnnnnnnnnnnnnnnnnnnnnnnnnnnnnnnnnnnnnnnnnnnnnnnnnnnnnnnnnnnnnnnnnnnnnnnnnnnnnnnnnnnnnnnnnnnnnnnnnnnnnnnnnnnnnnnnnnnnnnnnnnnnnnnnnnnnnnnnnnnnnnnnnnnnnnnnnnnnnnnnnnnnnnnnnnnnnnnnnnnnnnnnnnnnnnnnnnnnnnnnnnnnnnnnnnnnnnnnnnnnnnnnnnnnnnnnnnnnnnnnnnnnnnnnnnnnnnnnnnnnnnnnnnnnnnnnnnnnnnnnnnnnnnnnnnnnnnnnnnnnnnnnnnnnnnnnnnnnnnnnnnnnnnnnnnnnnnnnnnnnnnnnnnnnnnnnnnnnnnnnnnnnnnnnnnnnnnnnnnnnnnnnnnnnnnnnnnnnnnnnnnnnnnnnnnnnnnnnnnnnnnnnnnnnnnnnnnnnnnnnnnnnnnnnnnnnnnnnnnnnnnnnnnnnnnnnnnnnnnnnnnnnnnnnnnnnnnnnnnnnnnnnnnnnnnnnnnnnnnnnnnnnnnnnnnnnnnnnnnnnnnnnnnnnnnnnnnnnnnnnnnnnnnnnnnnnnnnnnnnnnnnnnnnnnnnnnnnnnnnnnnnnnnnnnnnnnnnnnnnnnnnnnnnnnnnnnnnnnnnnnnnnnnnnnnnnnnnnnnnnnnnnnnnnnnnnnnnnnnnnnnnnnnnnnnnnnnnnnnnnnnnnnnnnnnnnnnnnnnnnnnnnnnnnnnnnnnnnnnnnnnnnnnnnnnnnnnnnnnnnnnnnnnnnnnnnnnnnnnnnnnnnnnnnnnnnnnnnnnnnnnnnnnnnnnnnnnnnnnnnnnnnnnnnnnnnnnnnnnnnnnnnnnnnnnnnnnnnnnnnnnnnnnnnnnnnnnnnnnnnnnnnnnnnnnnnnnnnnnnnnnnnnnnnnnnnnnnnnnnnnnnnnnnnnnnnnnnnnnnnnnnnnnnnnnnnnnnnnnnnnnnnnnnnnnnnnnnnnnnnnnnnnnnnnnnnnnnnnnnnnnnnnnnnnnnnnnnnnnnnnnnnnnnnnnnnnnnnnnnnnnnnnnnnnnnnnnnnnnnnnnnnnnnnnnnnnnnnnnnnnnnnnnnnnnnnnnnnnnnnnnnnnnnnnnnnnnnnnnnnnnnnnnnnnnnnnnnnnnnnnnnnnnnnnnnnnnnnnnnnnnnnnnnnnnnnnnnnnnnnnnnnnnnnnnnnnnnnnnnnnnnnnnnnnnnnnnnnnnnnnnnnnnnnnnnnnnnnnnnnnnnnnnnnnnnnnnnnnnnnnnnnnnnnnnnnnnnnnnnnnnnnnnnnnnnnnnnnnnnnnnnnnnnnnnnnnnnnnnnnnnnnnnnnnnnnnnnnnnnnnnnnnnnnnnnnnnnnnnnnnnnnnnnnnnnnnnnnnnnnnnnnnnnnnnnnnnnnnnnnnnnnnnnnnnnnnnnnnnnnnnnnnnnnnnnnnnnnnnnnnnnnnnnnnnnnnnnnnnnnnnnnnnnnnnnnnnnnnnnnnnnnnnnnnnnnnnnnnnnnnnnnnnnnnnnnnnnnnnnnnnnnnnnnnnnnnnnnnnnnnnnnnnnnnnnnnnnnnnnnnnnnnnnnnnnnnnnnnnnnnnnnnnnnnnnnnnnnnnnnnnnnnnnnnnnnnnnnnnnnnnnnnnnnnnnnnnnnnnnnnnnnnnnnnnnnnnnnnnnnnnnnnnnnnnnnnnnnnnnnnnnnnnnnnnnnnnnnnnnnnnnnnnnnnnnnnnnnnnnnnnnnnnnnnnnnnnnnnnnnnnnnnnnnnnnnnnnnnnnnnnnnnnnnnnnnnnnnnnnnnnnnnnnnnnnnnnnnnnnnnnnnnnnnnnnnnnnnnnnnnnnnnnnnnnnnnnnnnnnnnnnnnnnnnnnnnnnnnnnnnnnnnnnnnnnnnnnnnnnnnnnnnnnnnnnnnnnnnnnnnnnnnnnnnnnnnnnnnnnnnnnnnnnnnnnnnnnnnnnnnnnnnnnnnnnnnnnnnnnnnnnnnnnnnnnnnnnnnnnnnnnnnnnnnnnnnnnnnnnnnnnnnnnnnnnnnnnnnnnnnnnnnnnnnnnnnnnnnnnnnnnnnnnnnnnnnnnnnnnnnnnnnnnnnnnnnnnnnnnnnnnnnnnnnnnnnnnnnnnnnnnnnnnnnnnnnnnnnnnnnnnnnnnnnnnnnnnnnnnnnnnnnnnnnnnnnnnnnnnnnnnnnnnnnnnnnnnnnnnnnnnnnnnnnnnnnnnnnnnnnnnnnnnnnnnnnnnnnnnnnnnnnnnnnnnnnnnnnnnnnnnnnnnnnnnnnnnnnnnnnnnnnnnnnnnnnnnnnnnnnnnnnnnnnnnnnnnnnnnnnnnnnnnnnnnnnnnnnnnnnnnnnnnnnnnnnnnnnnnnnnnnnnnnnnnnnnnnnnnnnnnnnnnnnnnnnnnnnnnnnnnnnnnnnnnnnnnnnnnnnnnnnnnnnnnnnnnnnnnnnnnnnnnnnnnnnnnnnnnnnnnnnnnnnnnnnnnnnnnnnnnnnnnnnnnnnnnnnnnnnnnnnnnnnnnnnnnnnnnnnnnnnnnnnnnnnnnnnnnnnnnnnnnnnnnnnnnnnnnnnnnnnnnnnnnnnnnnnnnnnnnnnnnnnnnnnnnnnnnnnnnnnnnnnnnnnnnnnnnnnnnnnnnnnnnnnnnnnnnnnnnnnnnnnnnnnnnnnnnnnnnnnnnnnnnnnnnnnnnnnnnnnnnnnnnnnnnnnnnnnnnnnnnnnnnnnnnnnnnnnnnnnnnnnnnnnnnnnnnnnnnnnnnnnnnnnnnnnnnnnnnnnnnnnnnnnnnnnnnnnnnnnnnnnnnnnnnnnnnnnnnnnnnnnnnnnnnnnnnnnnnnnnnnnnnnnnnnnnnnnnnnnnnnnnnnnnnnnnnnnnnnnnnnnnnnnnnnnnnnnnnnnnnnnnnnnnnnnnnnnnnnnnnnnnnnnnnnnnnnnnnnnnnnnnnnnnnnnnnnnnnnnnnnnnnnnnnnnnnnnnnnnnnnnnnnnnnnnnnnnnnnnnnnnnnnnnnnnnnnnnnnnnnnnnnnnnnnnnnnnnnnnnnnnnnnnnnnnnnnnnnnnnnnnnnnnnnnnnnnnnnnnnnnnnnnnnnnnnnnnnnnnnnnnnnnnnnnnnnnnnnnnnnnnnnnnnnnnnnnnnnnnnnnnnnnnnnnnnnnnnnnnnnnnnnnnnnnnnnnnnnnnnnnnnnnnnnnnnnnnnnnnnnnnnnnnnnnnnnnnnnnnnnnnnnnnnnnnnnnnnnnnnnnnnnnnnnnnnnnnnnnnnnnnnnnnnnnnnnnnnnnnnnnnnnnnnnnnnnnnnnnnnnnnnnnnnnnnnnnnnnnnnnnnnnnnnnnnnnnnnnnnnnnnnnnnnnnnnnnnnnnnnnnnnnnnnnnnnnnnnnnnnnnnnnnnnnnnnnnnnnnnnnnnnnnnnnnnnnnnnnnnnnnnnnnnnnnnnnnnnnnnnnnnnnnnnnnnnnnnnnnnnnnnnnnnnnnnnnnnnnnnnnnnnnnnnnnnnnnnnnnnnnnnnnnnnnnnnnnnnnnnnnnnnnnnnnnnnnnnnnnnnnnnnnnnnnnnnnnnnnnnnnnnnnnnnnnnnnnnnnnnnnnnnnnnnnnnnnnnnnnnnnnnnnnnnnnnnnnnnnnnnnnnnnnnnnnnnnnnnnnnnnnnnnnnnnnnnnnnnnnnnnnnnnnnnnnnnnnnnnnnnnnnnnnnnnnnnnnnnnnnnnnnnnnnnnnnnnnnnnnnnnnnnnnnnnnnnnnnnnnnnnnnnnnnnnnnnnnnnnnnnnnnnnnnnnnnnnnnnnnnnnnnnnnnnnnnnnnnnnnnnnnnnnnnnnnnnnnnnnnnnnnnnnnnnnnnnnnnnnnnnnnnnnnnnnnnnnnnnnnnnnnnnnnnnnnnnnnnnnnnnnnnnnnnnnnnnnnnnnnnnnnnnnnnnnnnnnnnnnnnnnnnnnnnnnnnnnnnnnnnnnnnnnnnnnnnnnnnnnnnnnnnnnnnnnnnnnnnnnnnnnnnnnnnnnnnnnnnnnnnnnnnnnnnnnnnnnnnnnnnnnnnnnnnnnnnnnnnnnnnnnnnnnnnnnnnnnnnnnnnnnnnnnnnnnnnnnnnnnnnnnnnnnnnnnnnnnnnnnnnnnnnnnnnnnnnnnnnnnnnnnnnnnnnnnnnnnnnnnnnnnnnnnnnnnnnnnnnnnnnnnnnnnnnnnnnnnnnnnnnnnnnnnnnnnnnnnnnnnnnnnnnnnnnnnnnnnnnnnnnnnnnnnnnnnnnnnnnnnnnnnnnnnnnnnnnnnnnnnnnnnnnnnnnnnnnnnnnnnnnnnnnnnnnnnnnnnnnnnnnnnnnnnnnnnnnnnnnnnnnnnnnnnnnnnnnnnnnnnnnnnnnnnnnnnnnnnnnnnnnnnnnnnnnnnnnnnnnnnnnnnnnnnnnnnnnnnnnnnnnnnnnnnnnnnnnnnnnnnnnnnnnnnnnnnnnnnnnnnnnnnnnnnnnnnnnnnnnnnnnnnnnnnnnnnnnnnnnnnnnnnnnnnnnnnnnnnnnnnnnnnnnnnnnnnnnnnnnnnnnnnnnnnnnnnnnnnnnnnnnnnnnnnnnnnnnnnnnnnnnnnnnnnnnnnnnnnnnnnnnnnnnnnnnnnnnnnnnnnnnnnnnnnnnnnnnnnnnnnnnnnnnnnnnnnnnnnnnnnnnnnnnnnnnnnnnnnnnnnnnnnnnnnnnnnnnnnnnnnnnnnnnnnnnnnnnnnnnnnnnnnnnnnnnnnnnnnnnnnnnnnnnnnnnnnnnnnnnnnnnnnnnnnnnnnnnnnnnnnnnnnnnnnnnnnnnnnnnnnnnnnnnnnnnnnnnnnnnnnnnnnnnnnnnnnnnnnnnnnnnnnnnnnnnnnnnnnnnnnnnnnnnnnnnnnnnnnnnnnnnnnnnnnnnnnnnnnnnnnnnnnnnnnnnnnnnnnnnnnnnnnnnnnnnnnnnnnnnnnnnnnnnnnnnnnnnnnnnnnnnnnnnnnnnnnnnnnnnnnnnnnnnnnnnnnnnnnnnnnnnnnnnnnnnnnnnnnnnnnnnnnnnnnnnnnnnnnnnnnnnnnnnnnnnnnnnnnnnnnnnnnnnnnnnnnnnnnnnnnnnnnnnnnnnnnnnnnnnnnnnnnnnnnnnnnnnnnnnnnnnnnnnnnnnnnnnnnnnnnnnnnnnnnnnnnnnnnnnnnnnnnnnnnnnnnnnnnnnnnnnnnnnnnnnnnnnnnnnnnnnnnnnnnnnnnnnnnnnnnnnnnnnnnnnnnnnnnnnnnnnnnnnnnnnnnnnnnnnnnnnnnnnnnnnnnnnnnnnnnnnnnnnnnnnnnnnnnnnnnnnnnnnnnnnnnnnnnnnnnnnnnnnnnnnnnnnnnnnnnnnnnnnnnnnnnnnnnnnnnnnnnnnnnnnnnnnnnnnnnnnnnnnnnnnnnnnnnnnnnnnnnnnnnnnnnnnnnnnnnnnnnnnnnnnnnnnnnnnnnnnnnnnnnnnnnnnnnnnnnnnnnnnnnnnnnnnnnnnnnnnnnnnnnnnnnnnnnnnnnnnnnnnnnnnnnnnnnnnnnnnnnnnnnnnnnnnnnnnnnnnnnnnnnnnnnnnnnnnnnnnnnnnnnnnnnnnnnnnnnnnnnnnnnnnnnnnnnnnnnnnnnnnnnnnnnnnnnnnnnnnnnnnnnnnnnnnnnnnnnnnnnnnnnnnnnnnnnnnnnnnnnnnnnnnnnnnnnnnnnnnnnnnnnnnnnnnnnnnnnnnnnnnnnnnnnnnnnnnnnnnnnnnnnnnnnnnnnnnnnnnnnnnnnnnnnnnnnnnnnnnnnnnnnnnnnnnnnnnnnnnnnnnnnnnnnnnnnnnnnnnnnnnnnnnnnnnnnnnnnnnnnnnnnnnnnnnnnnnnnnnnnnnnnnnnnnnnnnnnnnnnnnnnnnnnnnnnnnnnnnnnnnnnnnnnnnnnnnnnnnnnnnnnnnnnnnnnnnnnnnnnnnnnnnnnnnnnnnnnnnnnnnnnnnnnnnnnnnnnnnnnnnnnnnnnnnnnnnnnnnnnnnnnnnnnnnnnnnnnnnnnnnnnnnnnnnnnnnnnnnnnnnnnnnnnnnnnnnnnnnnnnnnnnnnnnnnnnnnnnnnnnnnnnnnnnnnnnnnnnnnnnnnnnnnnnnnnnnnnnnnnnnnnnnnnnnnnnnnnnnnnnnnnnnnnnnnnnnnnnnnnnnnnnnnnnnnnnnnnnnnnnnnnnnnnnnnnnnnnnnnnnnnnnnnnnnnnnnnnnnnnnnnnnnnnnnnnnnnnnnnnnnnnnnnnnnnnnnnnnnnnnnnnnnnnnnnnnnnnnnnnnnnnnnnnnnnnnnnnnnnnnnnnnnnnnnnnnnnnnnnnnnnnnnnnnnnnnnnnnnnnnnnnnnnnnnnnnnnnnnnnnnnnnnnnnnnnnnnnnnnnnnnnnnnnnnnnnnnnnnnnnnnnnnnnnnnnnnnnnnnnnnnnnnnnnnnnnnnnnnnnnnnnnnnnnnnnnnnnnnnnnnnnnnnnnnnnnnnnnnnnnnnnnnnnnnnnnnnnnnnnnnnnnnnnnnnnnnnnnnnnnnnnnnnnnnnnnnnnnnnnnnnnnnnnnnnnnnnnnnnnnnnnnnnnnnnnnnnnnnnnnnnnnnnnnnnnnnnnnnnnnnnnnnnnnnnnnnnnnnnnnnnnnnnnnnnnnnnnnnnnnnnnnnnnnnnnnnnnnnnnnnnnnnnnnnnnnnnnnnnnnnnnnnnnnnnnnnnnnnnnnnnnnnnnnnnnnnnnnnnnnnnnnnnnnnnnnnnnnnnnnnnnnnnnnnnnnnnnnnnnnnnnnnnnnnnnnnnnnnnnnnnnnnnnnnnnnnnnnnnnnnnnnnnnnnnnnnnnnnnnnnnnnnnnnnnnnnnnnnnnnnnnnnnnnnnnnnnnnnnnnnnnnnnnnnnnnnnnnnnnnnnnnnnnnnnnnnnnnnnnnnnnnnnnnnnnnnnnnnnnnnnnnnnnnnnnnnnnnnnnnnnnnnnnnnnnnnnnnnnnnnnnnnnnnnnnnnnnnnnnnnnnnnnnnnnnnnnnnnnnnnnnnnnnnnnnnnnnnnnnnnnnnnnnnnnnnnnnnnnnnnnnnnnnnnnnnnnnnnnnnnnnnnnnnnnnnnnnnnnnnnnnnnnnnnnnnnnnnnnnnnnnnnnnnnnnnnnnnnnnnnnnnnnnnnnnnnnnnnnnnnnnnnnnnnnnnnnnnnnnnnnnnnnnnnnnnnnnnnnnnnnnnnnnnnnnnnnnnnnnnnnnnnnnnnnnnnnnnnnnnnnnnnnnnnnnnnnnnnnnnnnnnnnnnnnnnnnnnnnnnnnnnnnnnnnnnnnnnnnnnnnnnnnnnnnnnnnnnnnnnnnnnnnnnnnnnnnnnnnnnnnnnnnnnnnnnnnnnnnnnnnnnnnnnnnnnnnnnnnnnnnnnnnnnnnnnnnnnnnnnnnnnnnnnnnnnnnnnnnnnnnnnnnnnnnnnnnnnnnnnnnnnnnnnnnnnnnnnnnnnnnnnnnnnnnnnnnnnnnnnnnnnnnnnnnnnnnnnnnnnnnnnnnnnnnnnnnnnnnnnnnnnnnnnnnnnnnnnnnnnnnnnnnnnnnnnnnnnnnnnnnnnnnnnnnnnnnnnnnnnnnnnnnnnnnnnnnnnnnnnnnnnnnnnnnnnnnnnnnnnnnnnnnnnnnnnnnnnnnnnnnnnnnnnnnnnnnnnnnnnnnnnnnnnnnnnnnnnnnnnnnnnnnnnnnnnnnnnnnnnnnnnnnnnnnnnnnnnnnnnnnnnnnnnnnnnnnnnnnnnnnnnnnnnnnnnnnnnnnnnnnnnnnnnnnnnnnnnnnnnnnnnnnnnnnnnnnnnnnnnnnnnnnnnnnnnnnnnnnnnnnnnnnnnnnnnnnnnnnnnnnnnnnnnnnnnnnnnnnnnnnnnnnnnnnnnnnnnnnnnnnnnnnnnnnnnnnnnnnnnnnnnnnnnnnnnnnnnnnnnnnnnnnnnnnnnnnnnnnnnnnnnnnnnnnnnnnnnnnnnnnnnnnnnnnnnnnnnnnnnnnnnnnnnnnnnnnnnnnnnnnnnnnnnnnnnnnnnnnnnnnnnnnnnnnnnnnnnnnnnnnnnnnnnnnnnnnnnnnnnnnnnnnnnnnnnnnnnnnnnnnnnnnnnnnnnnnnnnnnnnnnnnnnnnnnnnnnnnnnnnnnnnnnnnnnnnnnnnnnnnnnnnnnnnnnnnnnnnnnnnnnnnnnnnnnnnnnnnnnnnnnnnnnnnnnnnnnnnnnnnnnnnnnnnnnnnnnnnnnnnnnnnnnnnnnnnnnnnnnnnnnnnnnnnnnnnnnnnnnnnnnnnnnnnnnnnnnnnnnnnnnnnnnnnnnnnnnnnnnnnnnnnnnnnnnnnnnnnnnnnnnnnnnnnnnnnnnnnnnnnnnnnnnnnnnnnnnnnnnnnnnnnnnnnnnnnnnnnnnnnnnnnnnnnnnnnnnnnnnnnnnnnnnnnnnnnnnnnnnnnnnnnnnnnnnnnnnnnnnnnnnnnnnnnnnnnnnnnnnnnnnnnnnnnnnnnnnnnnnnnnnnnnnnnnnnnnnnnnnnnnnnnnnnnnnnnnnnnnnnnnnnnnnnnnnnnnnnnnnnnnnnnnnnnnnnnnnnnnnnnnnnnnnnnnnnnnnnnnnnnnnnnnnnnnnnnnnnnnnnnnnnnnnnnnnnnnnnnnnnnnnnnnnnnnnnnnnnnnnnnnnnnnnnnnnnnnnnnnnnnnnnnnnnnnnnnnnnnnnnnnnnnnnnnnnnnnnnnnnnnnnnnnnnnnnnnnnnnnnnnnnnnnnnnnnnnnnnnnnnnnnnnnnnnnnnnnnnnnnnnnnnnnnnnnnnnnnnnnnnnnnnnnnnnnnnnnnnnnnnnnnnnnnnnnnnnnnnnnnnnnnnnnnnnnnnnnnnnnnnnnnnnnnnnnnnnnnnnnnnnnnnnnnnnnnnnnnnnnnnnnnnnnnnnnnnnnnnnnnnnnnnnnnnnnnnnnnnnnnnnnnnnnnnnnnnnnnnnnnnnnnnnnnnnnnnnnnnnnnnnnnnnnnnnnnnnnnnnnnnnnnnnnnnnnnnnnnnnnnnnnnnnnnnnnnnnnnnnnnnnnnnnnnnnnnnnnnnnnnnnnnnnnnnnnnnnnnnnnnnnnnnnnnnnnnnnnnnnnnnnnnnnnnnnnnnnnnnnnnnnnnnnnnnnnnnnnnnnnnnnnnnnnnnnnnnnnnnnnnnnnnnnnnnnnnnnnnnnnnnnnnnnnnnnnnnnnnnnnnnnnnnnnnnnnnnnnnnnnnnnnnnnnnnnnnnnnnnnnnnnnnnnnnnnnnnnnnnnnnnnnnnnnnnnnnnnnnnnnnnnnnnnnnnnnnnnnnnnnnnnnnnnnnnnnnnnnnnnnnnnnnnnnnnnnnnnnnnnnnnnnnnnnnnnnnnnnnnnnnnnnnnnnnnnnnnnnnnnnnnnnnnnnnnnnnnnnnnnnnnnnnnnnnnnnnnnnnnnnnnnnnnnnnnnnnnnnnnnnnnnnnnnnnnnnnnnnnnnnnnnnnnnnnnnnnnnnnnnnnnnnnnnnnnnnnnnnnnnnnnnnnnnnnnnnnnnnnnnnnnnnnnnnnnnnnnnnnnnnnnnnnnnnnnnnnnnnnnnnnnnnnnnnnnnnnnnnnnnnnnnnnnnnnnnnnnnnnnnnnnnnnnnnnnnnnnnnnnnnnnnnnnnnnnnnnnnnnnnnnnnnnnnnnnnnnnnnnnnnnnnnnnnnnnnnnnnnnnnnnnnnnnnnnnnnnnnnnnnnnnnnnnnnnnnnnnnnnnnnnnnnnnnnnnnnnnnnnnnnnnnnnnnnnnnnnnnnnnnnnnnnnnnnnnnnnnnnnnnnnnnnnnnnnnnnnnnnnnnnnnnnnnnnnnnnnnnnnnnnnnnnnnnnnnnnnnnnnnnnnnnnnnnnnnnnnnnnnnnnnnnnnnnnnnnnnnnnnnnnnnnnnnnnnnnnnnnnnnnnnnnnnnnnnnnnnnnnnnnnnnnnnnnnnnnnnnnnnnnnnnnnnnnnnnnnnnnnnnnnnnnnnnnnnnnnnnnnnnnnnnnnnnnnnnnnnnnnnnnnnnnnnnnnnnnnnnnnnnnnnnnnnnnnnnnnnnnnnnnnnnnnnnnnnnnnnnnnnnnnnnnnnnnnnnnnnnnnnnnnnnnnnnnnnnnnnnnnnnnnnnnnnnnnnnnnnnnnnnnnnnnnnnnnnnnnnnnnnnnnnnnnnnnnnnnnnnnnnnnnnnnnnnnnnnnnnnnnnnnnnnnnnnnnnnnnnnnnnnnnnnnnnnnnnnnnnnnnnnnnnnnnnnnnnnnnnnnnnnnnnnnnnnnnnnnnnnnnnnnnnnnnnnnnnnnnnnnnnnnnnnnnnnnnnnnnnnnnnnnnnnnnnnnnnnnnnnnnnnnnnnnnnnnnnnnnnnnnnnnnnnnnnnnnnnnnnnnnnnnnnnnnnnnnnnnnnnnnnnnnnnnnnnnnnnnnnnnnnnnnnnnnnnnnnnnnnnnnnnnnnnnnnnnnnnnnnnnnnnnnnnnnnnnnnnnnnnnnnnnnnnnnnnnnnnnnnnnnnnnnnnnnnnnnnnnnnnnnnnnnnnnnnnnnnnnnnnnnnnnnnnnnnnnnnnnnnnnnnnnnnnnnnnnnnnnnnnnnnnnnnnnnnnnnnnnnnnnnnnnnnnnnnnnnnnnnnnnnnnnnnnnnnnnnnnnnnnnnnnnnnnnnnnnnnnnnnnnnnnnnnnnnnnnnnnnnnnnnnnnnnnnnnnnnnnnnnnnnnnnnnnnnnnnnnnnnnnnnnnnnnnnnnnnnnnnnnnnnnnnnnnnnnnnnnnnnnnnnnnnnnnnnnnnnnnnnnnnnnnnnnnnnnnnnnnnnnnnnnnnnnnnnnnnnnnnnnnnnnnnnnnnnnnnnnnnnnnnnnnnnnnnnnnnnnnnnnnnnnnnnnnnnnnnnnnnnnnnnnnnnnnnnnnnnnnnnnnnnnnnnnnnnnnnnnnnnnnnnnnnnnnnnnnnnnnnnnnnnnnnnnnnnnnnnnnnnnnnnnnnnnnnnnnnnnnnnnnnnnnnnnnnnnnnnnnnnnnnnnnnnnnnnnnnnnnnnnnnnnnnnnnnnnnnnnnnnnnnnnnnnnnnnnnnnnnnnnnnnnnnnnnnnnnnnnnnnnnnnnnnnnnnnnnnnnnnnnnnnnnnnnnnnnnnnnnnnnnnnnnnnnnnnnnnnnnnnnnnnnnnnnnnnnnnnnnnnnnnnnnnnnnnnnnnnnnnnnnnnnnnnnnnnnnnnnnnnnnnnnnnnnnnnnnnnnnnnnnnnnnnnnnnnnnnnnnnnnnnnnnnnnnnnnnnnnnnnnnnnnnnnnnnnnnnnnnnnnnnnnnnnnnnnnnnnnnnnnnnnnnnnnnnnnnnnnnnnnnnnnnnnnnnnnnnnnnnnnnnnnnnnnnnnnnnnnnnnnnnnnnnnnnnnnnnnnnnnnnnnnnnnnnnnnnnnnnnnnnnnnnnnnnnnnnnnnnnnnnnnnnnnnnnnnnnnnnnnnnnnnnnnnnnnnnnnnnnnnnnnnnnnnnnnnnnnnnnnnnnnnnnnnnnnnnnnnnnnnnnnnnnnnnnnnnnnnnnnnnnnnnnnnnnnnnnnnnnnnnnnnnnnnnnnnnnnnnnnnnnnnnnnnnnnnnnnnnnnnnnnnnnnnnnnnnnnnnnnnnnnnnnnnnnnnnnnnnnnnnnnnnnnnnnnnnnnnnnnnnnnnnnnnnnnnnnnnnnnnnnnnnnnnnnnnnnnnnnnnnnnnnnnnnnnnnnnnnnnnnnnnnnnnnnnnnnnnnnnnnnnnnnnnnnnnnnnnnnnnnnnnnnnnnnnnnnnnnnnnnnnnnnnnnnnnnnnnnnnnnnnnnnnnnnnnnnnnnnnnnnnnnnnnnnnnnnnnnnnnnnnnnnnnnnnnnnnnnnnnnnnnnnnnnnnnnnnnnnnnnnnnnnnnnnnnnnnnnnnnnnnnnnnnnnnnnnnnnnnnnnnnnnnnnnnnnnnnnnnnnnnnnnnnnnnnnnnnnnnnnnnnnnnnnnnnnnnnnnnnnnnnnnnnnnnnnnnnnnnnnnnnnnnnnnnnnnnnnnnnnnnnnnnnnnnnnnnnnnnnnnnnnnnnnnnnnnnnnnnnnnnnnnnnnnnnnnnnnnnnnnnnnnnnnnnnnnnnnnnnnnnnnnnnnnnnnnnnnnnnnnnnnnnnnnnnnnnnnnnnnnnnnnnnnnnnnnnnnnnnnnnnnnnnnnnnnnnnnnnnnnnnnnnnnnnnnnnnnnnnnnnnnnnnnnnnnnnnnnnnnnnnnnnnnnnnnnnnnnnnnnnnnnnnnnnnnnnnnnnnnnnnnnnnnnnnnnnnnnnnnnnnnnnnnnnnnnnnnnnnnnnnnnnnnnnnnnnnnnnnnnnnnnnnnnnnnnnnnnnnnnnnnnnnnnnnnnnnnnnnnnnnnnnnnnnnnnnnnnnnnnnnnnnnnnnnnnnnnnnnnnnnnnnnnnnnnnnnnnnnnnnnnnnnnnnnnnnnnnnnnnnnnnnnnnnnnnnnnnnnnnnnnnnnnnnnnnnnnnnnnnnnnnnnnnnnnnnnnnnnnnnnnnnnnnnnnnnnnnnnnnnnnnnnnnnnnnnnnnnnnnnnnnnnnnnnnnnnnnnnnnnnnnnnnnnnnnnnnnnnnnnnnnnnnnnnnnnnnnnnnnnnnnnnnnnnnnnnnnnnnnnnnnnnnnnnnnnnnnnnnnnnnnnnnnnnnnnnnnnnnnnnnnnnnnnnnnnnnnnnnnnnnnnnnnnnnnnnnnnnnnnnnnnnnnnnnnnnnnnnnnnnnnnnnnnnnnnnnnnnnnnnnnnnnnnnnnnnnnnnnnnnnnnnnnnnnnnnnnnnnnnnnnnnnnnnnnnnnnnnnnnnnnnnnnnnnnnnnnnnnnnnnnnnnnnnnnnnnnnnnnnnnnnnnnnnnnnnnnnnnnnnnnnnnnnnnnnnnnnnnnnnnnnnnnnnnnnnnnnnnnnnnnnnnnnnnnnnnnnnnnnnnnnnnnnnnnnnnnnnnnnnnnnnnnnnnnnnnnnnnnnnnnnnnnnnnnnnnnnnnnnnnnnnnnnnnnnnnnnnnnnnnnnnnnnnnnnnnnnnnnnnnnnnnnnnnnnnnnnnnnnnnnnnnnnnnnnnnnnnnnnnnnnnnnnnnnnnnnnnnnnnnnnnnnnnnnnnnnnnnnnnnnnnnnnnnnnnnnnnnnnnnnnnnnnnnnnnnnnnnnnnnnnnnnnnnnnnnnnnnnnnnnnnnnnnnnnnnnnnnnnnnnnnnnnnnnnnnnnnnnnnnnnnnnnnnnnnnnnnnnnnnnnnnnnnnnnnnnnnnnnnnnnnnnnnnnnnnnnnnnnnnnnnnnnnnnnnnnnnnnnnnnnnnnnnnnnnnnnnnnnnnnnnnnnnnnnnnnnnnnnnnnnnnnnnnnnnnnnnnnnnnnnnnnnnnnnnnnnnnnnnnnnnnnnnnnnnnnnnnnnnnnnnnnnnnnnnnnnnnnnnnnnnnnnnnnnnnnnnnnnnnnnnnnnnnnnnnnnnnnnnnnnnnnnnnnnnnnnnnnnnnnnnnnnnnnnnnnnnnnnnnnnnnnnnnnnnnnnnnnnnnnnnnnnnnnnnnnnnnnnnnnnnnnnnnnnnnnnnnnnnnnnnnnnnnnnnnnnnnnnnnnnnnnnnnnnnnnnnnnnnnnnnnnnnnnnnnnnnnnnnnnnnnnnnnnnnnnnnnnnnnnnnnnnnnnnnnnnnnnnnnnnnnnnnnnnnnnnnnnnnnnnnnnnnnnnnnnnnnnnnnnnnnnnnnnnnnnnnnnnnnnnnnnnnnnnnnnnnnnnnnnnnnnnnnnnnnnnnnnnnnnnnnnnnnnnnnnnnnnnnnnnnnnnnnnnnnnnnnnnnnnnnnnnnnnnnnnnnnnnnnnnnnnnnnnnnnnnnnnnnnnnnnnnnnnnnnnnnnnnnnnnnnnnnnnnnnnnnnnnnnnnnnnnnnnnnnnnnnnnnnnnnnnnnnnnnnnnnnnnnnnnnnnnnnnnnnnnnnnnnnnnnnnnnnnnnnnnnnnnnnnnnnnnnnnnnnnnnnnnnnnnnnnnnnnnnnnnnnnnnnnnnnnnnnnnnnnnnnnnnnnnnnnnnnnnnnnnnnnnnnnnnnnnnnnnnnnnnnnnnnnnnnnnnnnnnnnnnnnnnnnnnnnnnnnnnnnnnnnnnnnnnnnnnnnnnnnnnnnnnnnnnnnnnnnnnnnnnnnnnnnnnnnnnnnnnnnnnnnnnnnnnnnnnnnnnnnnnnnnnnnnnnnnnnnnnnnnnnnnnnnnnnnnnnnnnnnnnnnnnnnnnnnnnnnnnnnnnnnnnnnnnnnnnnnnnnnnnnnnnnnnnnnnnnnnnnnnnnnnnnnnnnnnnnnnnnnnnnnnnnnnnnnnnnnnnnnnnnnnnnnnnnnnnnnnnnnnnnnnnnnnnnnnnnnnnnnnnnnnnnnnnnnnnnnnnnnnnnnnnnnnnnnnnnnnnnnnnnnnnnnnnnnnnnnnnnnnnnnnnnnnnnnnnnnnnnnnnnnnnnnnnnnnnnnnnnnnnnnnnnnnnnnnnnnnnnnnnnnnnnnnnnnnnnnnnnnnnnnnnnnnnnnnnnnnnnnnnnnnnnnnnnnnnnnnnnnnnnnnnnnnnnnnnnnnnnnnnnnnnnnnnnnnnnnnnnnnnnnnnnnnnnnnnnnnnnnnnnnnnnnnnnnnnnnnnnnnnnnnnnnnnnnnnnnnnnnnnnnnnnnnnnnnnnnnnnnnnnnnnnnnnnnnnnnnnnnnnnnnnnnnnnnnnnnnnnnnnnnnnnnnnnnnnnnnnnnnnnnnnnnnnnnnnnnnnnnnnnnnnnnnnnnnnnnnnnnnnnnnnnnnnnnnnnnnnnnnnnnnnnnnnnnnnnnnnnnnnnnnnnnnnnnnnnnnnnnnnnnnnnnnnnnnnnnnnnnnnnnnnnnnnnnnnnnnnnnnnnnnnnnnnnnnnnnnnnnnnnnnnnnnnnnnnnnnnnnnnnnnnnnnnnnnnnnnnnnnnnnnnnnnnnnnnnnnnnnnnnnnnnnnnnnnnnnnnnnnnnnnnnnnnnnnnnnnnnnnnnnnnnnnnnnnnnnnnnnnnnnnnnnnnnnnnnnnnnnnnnnnnnnnnnnnnnnnnnnnnnnnnnnnnnnnnnnnnnnnnnnnnnnnnnnnnnnnnnnnnnnnnnnnnnnnnnnnnnnnnnnnnnnnnnnnnnnnnnnnnnnnnnnnnnnnnnnnnnnnnnnnnnnnnnnnnnnnnnnnnnnnnnnnnnnnnnnnnnnnnnnnnnnnnnnnnnnnnnnnnnnnnnnnnnnnnnnnnnnnnnnnnnnnnnnnnnnnnnnnnnnnnnnnnnnnnnnnnnnnnnnnnnnnnnnnnnnnnnnnnnnnnnnnnnnnnnnnnnnnnnnnnnnnnnnnnnnnnnnnnnnnnnnnnnnnnnnnnnnnnnnnnnnnnnnnnnnnnnnnnnnnnnnnnnnnnnnnnnnnnnnnnnnnnnnnnnnnnnnnnnnnnnnnnnnnnnnnnnnnnnnnnnnnnnnnnnnnnnnnnnnnnnnnnnnnnnnnnnnnnnnnnnnnnnnnnnnnnnnnnnnnnnnnnnnnnnnnnnnnnnnnnnnnnnnnnnnnnnnnnnnnnnnnnnnnnnnnnnnnnnnnnnnnnnnnnnnnnnnnnnnnnnnnnnnnnnnnnnnnnnnnnnnnnnnnnnnnnnnnnnnnnnnnnnnnnnnnnnnnnnnnnnnnnnnnnnnnnnnnnnnnnnnnnnnnnnnnnnnnnnnnnnnnnnnnnnnnnnnnnnnnnnnnnnnnnnnnnnnnnnnnnnnnnnnnnnnnnnnnnnnnnnnnnnnnnnnnnnnnnnnnnnnnnnnnnnnnnnnnnnnnnnnnnnnnnnnnnnnnnnnnnnnnnnnnnnnnnnnnnnnnnnnnnnnnnnnnnnnnnnnnnnnnnnnnnnnnnnnnnnnnnnnnnnnnnnnnnnnnnnnnnnnnnnnnnnnnnnnnnnnnnnnnnnnnnnnnnnnnnnnnnnnnnnnnnnnnnnnnnnnnnnnnnnnnnnnnnnnnnnnnnnnnnnnnnnnnnnnnnnnnnnnnnnnnnnnnnnnnnnnnnnnnnnnnnnnnnnnnnnnnnnnnnnnnnnnnnnnnnnnnnnnnnnnnnnnnnnnnnnnnnnnnnnnnnnnnnnnnnnnnnnnnnnnnnnnnnnnnnnnnnnnnnnnnnnnnnnnnnnnnnnnnnnnnnnnnnnnnnnnnnnnnnnnnnnnnnnnnnnnnnnnnnnnnnnnnnnnnnnnnnnnnnnnnnnnnnnnnnnnnnnnnnnnnnnnnnnnnnnnnnnnnnnnnnnnnnnnnnnnnnnnnnnnnnnnnnnnnnnnnnnnnnnnnnnnnnnnnnnnnnnnnnnnnnnnnnnnnnnnnnnnnnnnnnnnnnnnnnnnnnnnnnnnnnnnnnnnnnnnnnnnnnnnnnnnnnnnnnnnnnnnnnnnnnnnnnnnnnnnnnnnnnnnnnnnnnnnnnnnnnnnnnnnnnnnnnnnnnnnnnnnnnnnnnnnnnnnnnnnnnnnnnnnnnnnnnnnnnnnnnnnnnnnnnnnnnnnnnnnnnnnnnnnnnnnnnnnnnnnnnnnnnnnnnnnnnnnnnnnnnnnnnnnnnnnnnnnnnnnnnnnnnnnnnnnnnnnnnnnnnnnnnnnnnnnnnnnnnnnnnnnnnnnnnnnnnnnnnnnnnnnnnnnnnnnnnnnnnnnnnnnnnnnnnnnnnnnnnnnnnnnnnnnnnnnnnnnnnnnnnnnnnnnnnnnnnnnnnnnnnnnnnnnnnnnnnnnnnnnnnnnnnnnnnnnnnnnnnnnnnnnnnnnnnnnnnnnnnnnnnnnnnnnnnnnnnnnnnnnnnnnnnnnnnnnnnnnnnnnnnnnnnnnnnnnnnnnnnnnnnnnnnnnnnnnnnnnnnnnnnnnnnnnnnnnnnnnnnnnnnnnnnnnnnnnnnnnnnnnnnnnnnnnnnnnnnnnnnnnnnnnnnnnnnnnnnnnnnnnnnnnnnnnnnnnnnnnnnnnnnnnnnnnnnnnnnnnnnnnnnnnnnnnnnnnnnnnnnnnnnnnnnnnnnnnnnnnnnnnnnnnnnnnnnnnnnnnnnnnnnnnnnnnnnnnnnnnnnnnnnnnnnnnnnnnnnnnnnnnnnnnnnnnnnnnnnnnnnnnnnnnnnnnnnnnnnnnnnnnnnnnnnnnnnnnnnnnnnnnnnnnnnnnnnnnnnnnnnnnnnnnnnnnnnnnnnnnnnnnnnnnnnnnnnnnnnnnnnnnnnnnnnnnnnnnnnnnnnnnnnnnnnnnnnnnnnnnnnnnnnnnnnnnnnnnnnnnnnnnnnnnnnnnnnnnnnnnnnnnnnnnnnnnnnnnnnnnnnnnnnnnnnnnnnnnnnnnnnnnnnnnnnnnnnnnnnnnnnnnnnnnnnnnnnnnnnnnnnnnnnnnnnnnnnnnnnnnnnnnnnnnnnnnnnnnnnnnnnnnnnnnnnnnnnnnnnnnnnnnnnnnnnnnnnnnnnnnnnnnnnnnnnnnnnnnnnnnnnnnnnnnnnnnnnnnnnnnnnnnnnnnnnnnnnnnnnnnnnnnnnnnnnnnnnnnnnnnnnnnnnnnnnnnnnnnnnnnnnnnnnnnnnnnnnnnnnnnnnnnnnnnnnnnnnnnnnnnnnnnnnnnnnnnnnnnnnnnnnnnnnnnnnnnnnnnnnnnnnnnnnnnnnnnnnnnnnnnnnnnnnnnnnnnnnnnnnnnnnnnnnnnnnnnnnnnnnnnnnnnnnnnnnnnnnnnnnnnnnnnnnnnnnnnnnnnnnnnnnnnnnnnnnnnnnnnnnnnnnnnnnnnnnnnnnnnnnnnnnnnnnnnnnnnnnnnnnnnnnnnnnnnnnnnnnnnnnnnnnnnnnnnnnnnnnnnnnnnnnnnnnnnnnnnnnnnnnnnnnnnnnnnnnnnnnnnnnnnnnnnnnnnnnnnnnnnnnnnnnnnnnnnnnnnnnnnnnnnnnnnnnnnnnnnnnnnnnnnnnnnnnnnnnnnnnnnnnnnnnnnnnnnnnnnnnnnnnnnnnnnnnnnnnnnnnnnnnnnnnnnnnnnnnnnnnnnnnnnnnnnnnnnnnnnnnnnnnnnnnnnnnnnnnnnnnnnnnnnnnnnnnnnnnnnnnnnnnnnnnnnnnnnnnnnnnnnnnnnnnnnnnnnnnnnnnnnnnnnnnnnnnnnnnnnnnnnnnnnnnnnnnnnnnnnnnnnnnnnnnnnnnnnnnnnnnnnnnnnnnnnnnnnnnnnnnnnnnnnnnnnnnnnnnnnnnnnnnnnnnnnnnnnnnnnnnnnnnnnnnnnnnnnnnnnnnnnnnnnnnnnnnnnnnnnnnnnnnnnnnnnnnnnnnnnnnnnnnnnnnnnnnnnnnnnnnnnnnnnnnnnnnnnnnnnnnnnnnnnnnnnnnnnnnnnnnnnnnnnnnnnnnnnnnnnnnnnnnnnnnnnnnnnnnnnnnnnnnnnnnnnnnnnnnnnnnnnnnnnnnnnnnnnnnnnnnnnnnnnnnnnnnnnnnnnnnnnnnnnnnnnnnnnnnnnnnnnnnnnnnnnnnnnnnnnnnnnnnnnnnnnnnnnnnnnnnnnnnnnnnnnnnnnnnnnnnnnnnnnnnnnnnnnnnnnnnnnnnnnnnnnnnnnnnnnnnnnnnnnnnnnnnnnnnnnnnnnnnnnnnnnnnnnnnnnnnnnnnnnnnnnnnnnnnnnnnnnnnnnnnnnnnnnnnnnnnnnnnnnnnnnnnnnnnnnnnnnnnnnnnnnnnnnnnnnnnnnnnnnnnnnnnnnnnnnnnnnnnnnnnnnnnnnnnnnnnnnnnnnnnnnnnnnnnnnnnnnnnnnnnnnnnnnnnnnnnnnnnnnnnnnnnnnnnnnnnnnnnnnnnnnnnnnnnnnnnnnnnnnnnnnnnnnnnnnnnnnnnnnnnnnnnnnnnnnnnnnnnnnnnnnnnnnnnnnnnnnnnnnnnnnnnnnnnnnnnnnnnnnnnnnnnnnnnnnnnnnnnnnnnnnnnnnnnnnnnnnnnnnnnnnnnnnnnnnnnnnnnnnnnnnnnnnnnnnnnnnnnnnnnnnnnnnnnnnnnnnnnnnnnnnnnnnnnnnnnnnnnnnnnnnnnnnnnnnnnnnnnnnnnnnnnnnnnnnnnnnnnnnnnnnnnnnnnnnnnnnnnnnnnnnnnnnnnnnnnnnnnnnnnnnnnnnnnnnnnnnnnnnnnnnnnnnnnnnnnnnnnnnnnnnnnnnnnnnnnnnnnnnnnnnnnnnnnnnnnnnnnnnnnnnnnnnnnnnnnnnnnnnnnnnnnnnnnnnnnnnnnnnnnnnnnnnnnnnnnnnnnnnnnnnnnnnnnnnnnnnnnnnnnnnnnnnnnnnnnnnnnnnnnnnnnnnnnnnnnnnnnnnnnnnnnnnnnnnnnnnnnnnnnnnnnnnnnnnnnnnnnnnnnnnnnnnnnnnnnnnnnnnnnnnnnnnnnnnnnnnnnnnnnnnnnnnnnnnnnnnnnnnnnnnnnnnnnnnnnnnnnnnnnnnnnnnnnnnnnnnnnnnnnnnnnnnnnnnnnnnnnnnnnnnnnnnnnnnnnnnnnnnnnnnnnnnnnnnnnnnnnnnnnnnnnnnnnnnnnnnnnnnnnnnnnnnnnnnnnnnnnnnnnnnnnnnnnnnnnnnnnnnnnnnnnnnnnnnnnnnnnnnnnnnnnnnnnnnnnnnnnnnnnnnnnnnnnnnnnnnnnnnnnnnnnnnnnnnnnnnnnnnnnnnnnnnnnnnnnnnnnnnnnnnnnnnnnnnnnnnnnnnnnnnnnnnnnnnnnnnnnnnnnnnnnnnnnnnnnnnnnnnnnnnnnnnnnnnnnnnnnnnnnnnnnnnnnnnnnnnnnnnnnnnnnnnnnnnnnnnnnnnnnnnnnnnnnnnnnnnnnnnnnnnnnnnnnnnnnnnnnnnnnnnnnnnnnnnnnnnnnnnnnnnnnnnnnnnnnnnnnnnnnnnnnnnnnnnnnnnnnnnnnnnnnnnnnnnnnnnnnnnnnnnnnnnnnnnnnnnnnnnnnnnnnnnnnnnnnnnnnnnnnnnnnnnnnnnnnnnnnnnnnnnnnnnnnnnnnnnnnnnnnnnnnnnnnnnnnnnnnnnnnnnnnnnnnnnnnnnnnnnnnnnnnnnnnnnnnnnnnnnnnnnnnnnnnnnnnnnnnnnnnnnnnnnnnnnnnnnnnnnnnnnnnnnnnnnnnnnnnnnnnnnnnnnnnnnnnnnnnnnnnnnnnnnnnnnnnnnnnnnnnnnnnnnnnnnnnnnnnnnnnnnnnnnnnnnnnnnnnnnnnnnnnnnnnnnnnnnnnnnnnnnnnnnnnnnnnnnnnnnnnnnnnnnnnnnnnnnnnnnnnnnnnnnnnnnnnnnnnnnnnnnnnnnnnnnnnnnnnnnnnnnnnnnnnnnnnnnnnnnnnnnnnnnnnnnnnnnnnnnnnnnnnnnnnnnnnnnnnnnnnnnnnnnnnnnnnnnnnnnnnnnnnnnnnnnnnnnnnnnnnnnnnnnnnnnnnnnnnnnnnnnnnnnnnnnnnnnnnnnnnnnnnnnnnnnnnnnnnnnnnnnnnnnnnnnnnnnnnnnnnnnnnnnnnnnnnnnnnnnnnnnnnnnnnnnnnnnnnnnnnnnnnnnnnnnnnnnnnnnnnnnnnnnnnnnnnnnnnnnnnnnnnnnnnnnnnnnnnnnnnnnnnnnnnnnnnnnnnnnnnnnnnnnnnnnnnnnnnnnnnnnnnnnnnnnnnnnnnnnnnnnnnnnnnnnnnnnnnnnnnnnnnnnnnnnnnnnnnnnnnnnnnnnnnnnnnnnnnnnnnnnnnnnnnnnnnnnnnnnnnnnnnnnnnnnnnnnnnnnnnnnnnnnnnnnnnnnnnnnnnnnnnnnnnnnnnnnnnnnnnnnnnnnnnnnnnnnnnnnnnnnnnnnnnnnnnnnnnnnnnnnnnnnnnnnnnnnnnnnnnnnnnnnnnnnnnnnnnnnnnnnnnnnnnnnnnnnnnnnnnnnnnnnnnnnnnnnnnnnnnnnnnnnnnnnnnnnnnnnnnnnnnnnnnnnnnnnnnnnnnnnnnnnnnnnnnnnnnnnnnnnnnnnnnnnnnnnnnnnnnnnnnnnnnnnnnnnnnnnnnnnnnnnnnnnnnnnnnnnnnnnnnnnnnnnnnnnnnnnnnnnnnnnnnnnnnnnnnnnnnnnnnnnnnnnnnnnnnnnnnnnnnnnnnnnnnnnnnnnnnnnnnnnnnnnnnnnnnnnnnnnnnnnnnnnnnnnnnnnnnnnnnnnnnnnnnnnnnnnnnnnnnnnnnnnnnnnnnnnnnnnnnnnnnnnnnnnnnnnnnnnnnnnnnnnnnnnnnnnnnnnnnnnnnnnnnnnnnnnnnnnnnnnnnnnnnnnnnnnnnnnnnnnnnnnnnnnnnnnnnnnnnnnnnnnnnnnnnnnnnnnnnnnnnnnnnnnnnnnnnnnnnnnnnnnnnnnnnnnnnnnnnnnnnnnnnnnnnnnnnnnnnnnnnnnnnnnnnnnnnnnnnnnnnnnnnnnnnnnnnnnnnnnnnnnnnnnnnnnnnnnnnnnnnnnnnnnnnnnnnnnnnnnnnnnnnnnnnnnnnnnnnnnnnnnnnnnnnnnnnnnnnnnnnnnnnnnnnnnnnnnnnnnnnnnnnnnnnnnnnnnnnnnnnnnnnnnnnnnnnnnnnnnnnnnnnnnnnnnnnnnnnnnnnnnnnnnnnnnnnnnnnnnnnnnnnnnnnnnnnnnnnnnnnnnnnnnnnnnnnnnnnnnnnnnnnnnnnnnnnnnnnnnnnnnnnnnnnnnnnnnnnnnnnnnnnnnnnnnnnnnnnnnnnnnnnnnnnnnnnnnnnnnnnnnnnnnnnnnnnnnnnnnnnnnnnnnnnnnnnnnnnnnnnnnnnnnnnnnnnnnnnnnnnnnnnnnnnnnnnnnnnnnnnnnnnnnnnnnnnnnnnnnnnnnnnnnnnnnnnnnnnnnnnnnnnnnnnnnnnnnnnnnnnnnnnnnnnnnnnnnnnnnnnnnnnnnnnnnnnnnnnnnnnnnnnnnnnnnnnnnnnnnnnnnnnnnnnnnnnnnnnnnnnnnnnnnnnnnnnnnnnnnnnnnnnnnnnnnnnnnnnnnnnnnnnnnnnnnnnnnnnnnnnnnnnnnnnnnnnnnnnnnnnnnnnnnnnnnnnnnnnnnnnnnnnnnnnnnnnnnnnnnnnnnnnnnnnnnnnnnnnnnnnnnnnnnnnnnnnnnnnnnnnnnnnnnnnnnnnnnnnnnnnnnnnnnnnnnnnnnnnnnnnnnnnnnnnnnnnnnnnnnnnnnnnnnnnnnnnnnnnnnnnnnnnnnnnnnnnnnnnnnnnnnnnnnnnnnnnnnnnnnnnnnnnnnnnnnnnnnnnnnnnnnnnnnnnnnnnnnnnnnnnnnnnnnnnnnnnnnnnnnnnnnnnnnnnnnnnnnnnnnnnnnnnnnnnnnnnnnnnnnnnnnnnnnnnnnnnnnnnnnnnnnnnnnnnnnnnnnnnnnnnnnnnnnnnnnnnnnnnnnnnnnnnnnnnnnnnnnnnnnnnnnnnnnnnnnnnnnnnnnnnnnnnnnnnnnnnnnnnnnnnnnnnnnnnnnnnnnnnnnnnnnnnnnnnnnnnnnnnnnnnnnnnnnnnnnnnnnnnnnnnnnnnnnnnnnnnnnnnnnnnnnnnnnnnnnnnnnnnnnnnnnnnnnnnnnnnnnnnnnnnnnnnnnnnnnnnnnnnnnnnnnnnnnnnnnnnnnnnnnnnnnnnnnnnnnnnnnnnnnnnnnnnnnnnnnnnnnnnnnnnnnnnnnnnnnnnnnnnnnnnnnnnnnnnnnnnnnnnnnnnnnnnnnnnnnnnnnnnnnnnnnnnnnnnnnnnnnnnnnnnnnnnnnnnnnnnnnnnnnnnnnnnnnnnnnnnnnnnnnnnnnnnnnnnnnnnnnnnnnnnnnnnnnnnnnnnnnnnnnnnnnnnnnnnnnnnnnnnnnnnnnnnnnnnnnnnnnnnnnnnnnnnnnnnnnnnnnnnnnnnnnnnnnnnnnnnnnnnnnnnnnnnnnnnnnnnnnnnnnnnnnnnnnnnnnnnnnnnnnnnnnnnnnnnnnnnnnnnnnnnnnnnnnnnnnnnnnnnnnnnnnnnnnnnnnnnnnnnnnnnnnnnnnnnnnnnnnnnnnnnnnnnnnnnnnnnnnnnnnnnnnnnnnnnnnnnnnnnnnnnnnnnnnnnnnnnnnnnnnnnnnnnnnnnnnnnnnnnnnnnnnnnnnnnnnnnnnnnnnnnnnnnnnnnnnnnnnnnnnnnnnnnnnnnnnnnnnnnnnnnnnnnnnnnnnnnnnnnnnnnnnnnnnnnnnnnnnnnnnnnnnnnnnnnnnnnnnnnnnnnnnnnnnnnnnnnnnnnnnnnnnnnnnnnnnnnnnnnnnnnnnnnnnnnnnnnnnnnnnnnnnnnnnnnnnnnnnnnnnnnnnnnnnnnnnnnnnnnnnnnnnnnnnnnnnnnnnnnnnnnnnnnnnnnnnnnnnnnnnnnnnnnnnnnnnnnnnnnnnnnnnnnnnnnnnnnnnnnnnnnnnnnnnnnnnnnnnnnnnnnnnnnnnnnnnnnnnnnnnnnnnnnnnnnnnnnnnnnnnnnnnnnnnnnnnnnnnnnnnnnnnnnnnnnnnnnnnnnnnnnnnnnnnnnnnnnnnnnnnnnnnnnnnnnnnnnnnnnnnnnnnnnnnnnnnnnnnnnnnnnnnnnnnnnnnnnnnnnnnnnnnnnnnnnnnnnnnnnnnnnnnnnnnnnnnnnnnnnnnnnnnnnnnnnnnnnnnnnnnnnnnnnnnnnnnnnnnnnnnnnnnnnnnnnnnnnnnnnnnnnnnnnnnnnnnnnnnnnnnnnnnnnnnnnnnnnnnnnnnnnnnnnnnnnnnnnnnnnnnnnnnnnnnnnnnnnnnnnnnnnnnnnnnnnnnnnnnnnnnnnnnnnnnnnnnnnnnnnnnnnnnnnnnnnnnnnnnnnnnnnnnnnnnnnnnnnnnnnnnnnnnnnnnnnnnnnnnnnnnnnnnnnnnnnnnnnnnnnnnnnnnnnnnnnnnnnnnnnnnnnnnnnnnnnnnnnnnnnnnnnnnnnnnnnnnnnnnnnnnnnnnnnnnnnnnnnnnnnnnnnnnnnnnnnnnnnnnnnnnnnnnnnnnnnnnnnnnnnnnnnnnnnnnnnnnnnnnnnnnnnnnnnnnnnnnnnnnnnnnnnnnnnnnnnnnnnnnnnnnnnnnnnnnnnnnnnnnnnnnnnnnnnnnnnnnnnnnnnnnnnnnnnnnnnnnnnnnnnnnnnnnnnnnnnnnnnnnnnnnnnnnnnnnnnnnnnnnnnnnnnnnnnnnnnnnnnnnnnnnnnnnnnnnnnnnnnnnnnnnnnnnnnnnnnnnnnnnnnnnnnnnnnnnnnnnnnnnnnnnnnnnnnnnnnnnnnnnnnnnnnnnnnnnnnnnnnnnnnnnnnnnnnnnnnnnnnnnnnnnnnnnnnnnnnnnnnnnnnnnnnnnnnnnnnnnnnnnnnnnnnnnnnnnnnnnnnnnnnnnnnnnnnnnnnnnnnnnnnnnnnnnnnnnnnnnnnnnnnnnnnnnnnnnnnnnnnnnnnnnnnnnnnnnnnnnnnnnnnnnnnnnnnnnnnnnnnnnnnnnnnnnnnnnnnnnnnnnnnnnnnnnnnnnnnnnnnnnnnnnnnnnnnnnnnnnnnnnnnnnnnnnnnnnnnnnnnnnnnnnnnnnnnnnnnnnnnnnnnnnnnnnnnnnnnnnnnnnnnnnnnnnnnnnnnnnnnnnnnnnnnnnnnnnnnnnnnnnnnnnnnnnnnnnnnnnnnnnnnnnnnnnnnnnnnnnnnnnnnnnnnnnnnnnnnnnnnnnnnnnnnnnnnnnnnnnnnnnnnnnnnnnnnnnnnnnnnnnnnnnnnnnnnnnnnnnnnnnnnnnnnnnnnnnnnnnnnnnnnnnnnnnnnnnnnnnnnnnnnnnnnnnnnnnnnnnnnnnnnnnnnnnnnnnnnnnnnnnnnnnnnnnnnnnnnnnnnnnnnnnnnnnnnnnnnnnnnnnnnnnnnnnnnnnnnnnnnnnnnnnnnnnnnnnnnnnnnnnnnnnnnnnnnnnnnnnnnnnnnnnnnnnnnnnnnnnnnnnnnnnnnnnnnnnnnnnnnnnnnnnnnnnnnnnnnnnnnnnnnnnnnnnnnnnnnnnnnnnnnnnnnnnnnnnnnnnnnnnnnnnnnnnnnnnnnnnnnnnnnnnnnnnnnnnnnnnnnnnnnnnnnnnnnnnnnnnnnnnnnnnnnnnnnnnnnnnnnnnnnnnnnnnnnnnnnnnnnnnnnnnnnnnnnnnnnnnnnnnnnnnnnnnnnnnnnnnnnnnnnnnnnnnnnnnnnnnnnnnnnnnnnnnnnnnnnnnnnnnnnnnnnnnnnnnnnnnnnnnnnnnnnnnnnnnnnnnnnnnnnnnnnnnnnnnnnnnnnnnnnnnnnnnnnnnnnnnnnnnnnnnnnnnnnnnnnnnnnnnnnnnnnnnnnnnnnnnnnnnnnnnnnnnnnnnnnnnnnnnnnnnnnnnnnnnnnnnnnnnnnnnnnnnnnnnnnnnnnnnnnnnnnnnnnnnnnnnnnnnnnnnnnnnnnnnnnnnnnnnnnnnnnnnnnnnnnnnnnnnnnnnnnnnnnnnnnnnnnnnnnnnnnnnnnnnnnnnnnnnnnnnnnnnnnnnnnnnnnnnnnnnnnnnnnnnnnnnnnnnnnnnnnnnnnnnnnnnnnnnnnnnnnnnnnnnnnnnnnnnnnnnnnnnnnnnnnnnnnnnnnnnnnnnnnnnnnnnnnnnnnnnnnnnnnnnnnnnnnnnnnnnnnnnnnnnnnnnnnnnnnnnnnnnnnnnnnnnnnnnnnnnnnnnnnnnnnnnnnnnnnnnnnnnnnnnnnnnnnnnnnnnnnnnnnnnnnnnnnnnnnnnnnnnnnnnnnnnnnnnnnnnnnnnnnnnnnnnnnnnnnnnnnnnnnnnnnnnnnnnnnnnnnnnnnnnnnnnnnnnnnnnnnnnnnnnnnnnnnnnnnnnnnnnnnnnnnnnnnnnnnnnnnnnnnnnnnnnnnnnnnnnnnnnnnnnnnnnnnnnnnnnnnnnnnnnnnnnnnnnnnnnnnnnnnnnnnnnnnnnnnnnnnnnnnnnnnnnnnnnnnnnnnnnnnnnnnnnnnnnnnnnnnnnnnnnnnnnnnnnnnnnnnnnnnnnnnnnnnnnnnnnnnnnnnnnnnnnnnnnnnnnnnnnnnnnnnnnnnnnnnnnnnnnnnnnnnnnnnnnnnnnnnnnnnnnnnnnnnnnnnnnnnnnnnnnnnnnnnnnnnnnnnnnnnnnnnnnnnnnnnnnnnnnnnnnnnnnnnnnnnnnnnnnnnnnnnnnnnnnnnnnnnnnnnnnnnnnnnnnnnnnnnnnnnnnnnnnnnnnnnnnnnnnnnnnnnnnnnnnnnnnnnnnnnnnnnnnnnnnnnnnnnnnnnnnnnnnnnnnnnnnnnnnnnnnnnnnnnnnnnnnnnnnnnnnnnnnnnnnnnnnnnnnnnnnnnnnnnnnnnnnnnnnnnnnnnnnnnnnnnnnnnnnnnnnnnnnnnnnnnnnnnnnnnnnnnnnnnnnnnnnnnnnnnnnnnnnnnnnnnnnnnnnnnnnnnnnnnnnnnnnnnnnnnnnnnnnnnnnnnnnnnnnnnnnnnnnnnnnnnnnnnnnnnnnnnnnnnnnnnnnnnnnnnnnnnnnnnnnnnnnnnnnnnnnnnnnnnnnnnnnnnnnnnnnnnnnnnnnnnnnnnnnnnnnnnnnnnnnnnnnnnnnnnnnnnnnnnnnnnnnnnnnnnnnnnnnnnnnnnnnnnnnnnnnnnnnnnnnnnnnnnnnnnnnnnnnnnnnnnnnnnnnnnnnnnnnnnnnnnnnnnnnnnnnnnnnnnnnnnnnnnnnnnnnnnnnnnnnnnnnnnnnnnnnnnnnnnnnnnnnnnnnnnnnnnnnnnnnnnnnnnnnnnnnnnnnnnnnnnnnnnnnnnnnnnnnnnnnnnnnnnnnnnnnnnnnnnnnnnnnnnnnnnnnnnnnnnnnnnnnnnnnnnnnnnnnnnnnnnnnnnnnnnnnnnnnnnnnnnnnnnnnnnnnnnnnnnnnnnnnnnnnnnnnnnnnnnnnnnnnnnnnnnnnnnnnnnnnnnnnnnnnnnnnnnnnnnnnnnnnnnnnnnnnnnnnnnnnnnnnnnnnnnnnnnnnnnnnnnnnnnnnnnnnnnnnnnnnnnnnnnnnnnnnnnnnnnnnnnnnnnnnnnnnnnnnnnnnnnnnnnnnnnnnnnnnnnnnnnnnnnnnnnnnnnnnnnnnnnnnnnnnnnnnnnnnnnnnnnnnnnnnnnnnnnnnnnnnnnnnnnnnnnnnnnnnnnnnnnnnnnnnnnnnnnnnnnnnnnnnnnnnnnnnnnnnnnnnnnnnnnnnnnnnnnnnnnnnnnnnnnnnnnnnnnnnnnnnnnnnnnnnnnnnnnnnnnnnnnnnnnnnnnnnnnnnnnnnnnnnnnnnnnnnnnnnnnnnnnnnnnnnnnnnnnnnnnnnnnnnnnnnnnnnnnnnnnnnnnnnnnnnnnnnnnnnnnnnnnnnnnnnnnnnnnnnnnnnnnnnnnnnnnnnnnnnnnnnnnnnnnnnnnnnnnnnnnnnnnnnnnnnnnnnnnnnnnnnnnnnnnnnnnnnnnnnnnnnnnnnnnnnnnnnnnnnnnnnnnnnnnnnnnnnnnnnnnnnnnnnnnnnnnnnnnnnnnnnnnnnnnnnnnnnnnnnnnnnnnnnnnnnnnnnnnnnnnnnnnnnnnnnnnnnnnnnnnnnnnnnnnnnnnnnnnnnnnnnnnnnnnnnnnnnnnnnnnnnnnnnnnnnnnnnnnnnnnnnnnnnnnnnnnnnnnnnnnnnnnnnnnnnnnnnnnnnnnnnnnnnnnnnnnnnnnnnnnnnnnnnnnnnnnnnnnnnnnnnnnnnnnnnnnnnnnnnnnnnnnnnnnnnnnnnnnnnnnnnnnnnnnnnnnnnnnnnnnnnnnnnnnnnnnnnnnnnnnnnnnnnnnnnnnnnnnnnnnnnnnnnnnnnnnnnnnnnnnnnnnnnnnnnnnnnnnnnnnnnnnnnnnnnnnnnnnnnnnnnnnnnnnnnnnnnnnnnnnnnnnnnnnnnnnnnnnnnnnnnnnnnnnnnnnnnnnnnnnnnnnnnnnnnnnnnnnnnnnnnnnnnnnnnnnnnnnnnnnnnnnnnnnnnnnnnnnnnnnnnnnnnnnnnnnnnnnnnnnnnnnnnnnnnnnnnnnnnnnnnnnnnnnnnnnnnnnnnnnnnnnnnnnnnnnnnnnnnnnnnnnnnnnnnnnnnnnnnnnnnnnnnnnnnnnnnnnnnnnnnnnnnnnnnnnnnnnnnnnnnnnnnnnnnnnnnnnnnnnnnnnnnnnnnnnnnnnnnnnnnnnnnnnnnnnnnnnnnnnnnnnnnnnnnnnnnnnnnnnnnnnnnnnnnnnnnnnnnnnnnnnnnnnnnnnnnnnnnnnnnnnnnnnnnnnnnnnnnnnnnnnnnnnnnnnnnnnnnnnnnnnnnnnnnnnnnnnnnnnnnnnnnnnnnnnnnnnnnnnnnnnnnnnnnnnnnnnnnnnnnnnnnnnnnnnnnnnnnnnnnnnnnnnnnnnnnnnnnnnnnnnnnnnnnnnnnnnnnnnnnnnnnnnnnnnnnnnnnnnnnnnnnnnnnnnnnnnnnnnnnnnnnnnnnnnnnnnnnnnnnnnnnnnnnnnnnnnnnnnnnnnnnnnnnnnnnnnnnnnnnnnnnnnnnnnnnnnnnnnnnnnnnnnnnnnnnnnnnnnnnnnnnnnnnnnnnnnnnnnnnnnnnnnnnnnnnnnnnnnnnnnnnnnnnnnnnnnnnnnnnnnnnnnnnnnnnnnnnnnnnnnnnnnnnnnnnnnnnnnnnnnnnnnnnnnnnnnnnnnnnnnnnnnnnnnnnnnnnnnnnnnnnnnnnnnnnnnnnnnnnnnnnnnnnnnnnnnnnnnnnnnnnnnnnnnnnnnnnnnnnnnnnnnnnnnnnnnnnnnnnnnnnnnnnnnnnnnnnnnnnnnnnnnnnnnnnnnnnnnnnnnnnnnnnnnnnnnnnnnnnnnnnnnnnnnnnnnnnnnnnnnnnnnnnnnnnnnnnnnnnnnnnnnnnnnnnnnnnnnnnnnnnnnnnnnnnnnnnnnnnnnnnnnnnnnnnnnnnnnnnnnnnnnnnnnnnnnnnnnnnnnnnnnnnnnnnnnnnnnnnnnnnnnnnnnnnnnnnnnnnnnnnnnnnnnnnnnnnnnnnnnnnnnnnnnnnnnnnnnnnnnnnnnnnnnnnnnnnnnnnnnnnnnnnnnnnnnnnnnnnnnnnnnnnnnnnnnnnnnnnnnnnnnnnnnnnnnnnnnnnnnnnnnnnnnnnnnnnnnnnnnnnnnnnnnnnnnnnnnnnnnnnnnnnnnnnnnnnnnnnnnnnnnnnnnnnnnnnnnnnnnnnnnnnnnnnnnnnnnnnnnnnnnnnnnnnnnnnnnnnnnnnnnnnnnnnnnnnnnnnnnnnnnnnnnnnnnnnnnnnnnnnnnnnnnnnnnnnnnnnnnnnnnnnnnnnnnnnnnnnnnnnnnnnnnnnnnnnnnnnnnnnnnnnnnnnnnnnnnnnnnnnnnnnnnnnnnnnnnnnnnnnnnnnnnnnnnnnnnnnnnnnnnnnnnnnnnnnnnnnnnnnnnnnnnnnnnnnnnnnnnnnnnnnnnnnnnnnnnnnnnnnnnnnnnnnnnnnnnnnnnnnnnnnnnnnnnnnnnnnnnnnnnnnnnnnnnnnnnnnnnnnnnnnnnnnnnnnnnnnnnnnnnnnnnnnnnnnnnnnnnnnnnnnnnnnnnnnnnnnnnnnnnnnnnnnnnnnnnnnnnnnnnnnnnnnnnnnnnnnnnnnnnnnnnnnnnnnnnnnnnnnnnnnnnnnnnnnnnnnnnnnnnnnnnnnnnnnnnnnnnnnnnnnnnnnnnnnnnnnnnnnnnnnnnnnnnnnnnnnnnnnnnnnnnnnnnnnnnnnnnnnnnnnnnnnnnnnnnnnnnnnnnnnnnnnnnnnnnnnnnnnnnnnnnnnnnnnnnnnnnnnnnnnnnnnnnnnnnnnnnnnnnnnnnnnnnnnnnnnnnnnnnnnnnnnnnnnnnnnnnnnnnnnnnnnnnnnnnnnnnnnnnnnnnnnnnnnnnnnnnnnnnnnnnnnnnnnnnnnnnnnnnnnnnnnnnnnnnnnnnnnnnnnnnnnnnnnnnnnnnnnnnnnnnnnnnnnnnnnnnnnnnnnnnnnnnnnnnnnnnnnnnnnnnnnnnnnnnnnnnnnnnnnnnnnnnnnnnnnnnnnnnnnnnnnnnnnnnnnnnnnnnnnnnnnnnnnnnnnnnnnnnnnnnnnnnnnnnnnnnnnnnnnnnnnnnnnnnnnnnnnnnnnnnnnnnnnnnnnnnnnnnnnnnnnnnnnnnnnnnnnnnnnnnnnnnnnnnnnnnnnnnnnnnnnnnnnnnnnnnnnnnnnnnnnnnnnnnnnnnnnnnnnnnnnnnnnnnnnnnnnnnnnnnnnnnnnnnnnnnnnnnnnnnnnnnnnnnnnnnnnnnnnnnnnnnnnnnnnnnnnnnnnnnnnnnnnnnnnnnnnnnnnnnnnnnnnnnnnnnnnnnnnnnnnnnnnnnnnnnnnnnnnnnnnnnnnnnnnnnnnnnnnnnnnnnnnnnnnnnnnnnnnnnnnnnnnnnnnnnnnnnnnnnnnnnnnnnnnnnnnnnnnnnnnnnnnnnnnnnnnnnnnnnnnnnnnnnnnnnnnnnnnnnnnnnnnnnnnnnnnnnnnnnnnnnnnnnnnnnnnnnnnnnnnnnnnnnnnnnnnnnnnnnnnnnnnnnnnnnnnnnnnnnnnnnnnnnnnnnnnnnnnnnnnnnnnnnnnnnnnnnnnnnnnnnnnnnnnnnnnnnnnnnnnnnnnnnnnnnnnnnnnnnnnnnnnnnnnnnnnnnnnnnnnnnnnnnnnnnnnnnnnnnnnnnnnnnnnnnnnnnnnnnnnnnnnnnnnnnnnnnnnnnnnnnnnnnnnnnnnnnnnnnnnnnnnnnnnnnnnnnnnnnnnnnnnnnnnnnnnnnnnnnnnnnnnnnnnnnnnnnnnnnnnnnnnnnnnnnnnnnnnnnnnnnnnnnnnnnnnnnnnnnnnnnnnnnnnnnnnnnnnnnnnnnnnnnnnnnnnnnnnnnnnnnnnnnnnnnnnnnnnnnnnnnnnnnnnnnnnnnnnnnnnnnnnnnnnnnnnnnnnnnnnnnnnnnnnnnnnnnnnnnnnnnnnnnnnnnnnnnnnnnnnnnnnnnnnnnnnnnnnnnnnnnnnnnnnnnnnnnnnnnnnnnnnnnnnnnnnnnnnnnnnnnnnnnnnnnnnnnnnnnnnnnnnnnnnnnnnnnnnnnnnnnnnnnnnnnnnnnnnnnnnnnnnnnnnnnnnnnnnnnnnnnnnnnnnnnnnnnnnnnnnnnnnnnnnnnnnnnnnnnnnnnnnnnnnnnnnnnnnnnnnnnnnnnnnnnnnnnnnnnnnnnnnnnnnnnnnnnnnnnnnnnnnnnnnnnnnnnnnnnnnnnnnnnnnnnnnnnnnnnnnnnnnnnnnnnnnnnnnnnnnnnnnnnnnnnnnnnnnnnnnnnnnnnnnnnnnnnnnnnnnnnnnnnnnnnnnnnnnnnnnnnnnnnnnnnnnnnnnnnnnnnnnnnnnnnnnnnnnnnnnnnnnnnnnnnnnnnnnnnnnnnnnnnnnnnnnnnnnnnnnnnnnnnnnnnnnnnnnnnnnnnnnnnnnnnnnnnnnnnnnnnnnnnnnnnnnnnnnnnnnnnnnnnnnnnnnnnnnnnnnnnnnnnnnnnnnnnnnnnnnnnnnnnnnnnnnnnnnnnnnnnnnnnnnnnnnnnnnnnnnnnnnnnnnnnnnnnnnnnnnnnnnnnnnnnnnnnnnnnnnnnnnnnnnnnnnnnnnnnnnnnnnnnnnnnnnnnnnnnnnnnnnnnnnnnnnnnnnnnnnnnnnnnnnnnnnnnnnnnnnnnnnnnnnnnnnnnnnnnnnnnnnnnnnnnnnnnnnnnnnnnnnnnnnnnnnnnnnnnnnnnnnnnnnnnnnnnnnnnnnnnnnnnnnnnnnnnnnnnnnnnnnnnnnnnnnnnnnnnnnnnnnnnnnnnnnnnnnnnnnnnnnnnnnnnnnnnnnnnnnnnnnnnnnnnnnnnnnnnnnnnnnnnnnnnnnnnnnnnnnnnnnnnnnnnnnnnnnnnnnnnnnnnnnnnnnnnnnnnnnnnnnnnnnnnnnnnnnnnnnnnnnnnnnnnnnnnnnnnnnnnnnnnnnnnnnnnnnnnnnnnnnnnnnnnnnnnnnnnnnnnnnnnnnnnnnnnnnnnnnnnnnnnnnnnnnnnnnnnnnnnnnnnnnnnnnnnnnnnnnnnnnnnnnnnnnnnnnnnnnnnnnnnnnnnnnnnnnnnnnnnnnnnnnnnnnnnnnnnnnnnnnnnnnnnnnnnnnnnnnnnnnnnnnnnnnnnnnnnnnnnnnnnnnnnnnnnnnnnnnnnnnnnnnnnnnnnnnnnnnnnnnnnnnnnnnnnnnnnnnnnnnnnnnnnnnnnnnnnnnnnnnnnnnnnnnnnnnnnnnnnnnnnnnnnnnnnnnnnnnnnnnnnnnnnnnnnnnnnnnnnnnnnnnnnnnnnnnnnnnnnnnnnnnnnnnnnnnnnnnnnnnnnnnnnnnnnnnnnnnnnnnnnnnnnnnnnnnnnnnnnnnnnnnnnnnnnnnnnnnnnnnnnnnnnnnnnnnnnnnnnnnnnnnnnnnnnnnnnnnnnnnnnnnnnnnnnnnnnnnnnnnnnnnnnnnnnnnnnnnnnnnnnnnnnnnnnnnnnnnnnnnnnnnnnnnnnnnnnnnnnnnnnnnnnnnnnnnnnnnnnnnnnnnnnnnnnnnnnnnnnnnnnnnnnnnnnnnnnnnnnnnnnnnnnnnnnnnnnnnnnnnnnnnnnnnnnnnnnnnnnnnnnnnnnnnnnnnnnnnnnnnnnnnnnnnnnnnnnnnnnnnnnnnnnnnnnnnnnnnnnnnnnnnnnnnnnnnnnnnnnnnnnnnnnnnnnnnnnnnnnnnnnnnnnnnnnnnnnnnnnnnnnnnnnnnnnnnnnnnnnnnnnnnnnnnnnnnnnnnnnnnnnnnnnnnnnnnnnnnnnnnnnnnnnnnnnnnnnnnnnnnnnnnnnnnnnnnnnnnnnnnnnnnnnnnnnnnnnnnnnnnnnnnnnnnnnnnnnnnnnnnnnnnnnnnnnnnnnnnnnnnnnnnnnnnnnnnnnnnnnnnnnnnnnnnnnnnnnnnnnnnnnnnnnnnnnnnnnnnnnnnnnnnnnnnnnnnnnnnnnnnnnnnnnnnnnnnnnnnnnnnnnnnnnnnnnnnnnnnnnnnnnnnnnnnnnnnnnnnnnnnnnnnnnnnnnnnnnnnnnnnnnnnnnnnnnnnnnnnnnnnnnnnnnnnnnnnnnnnnnnnnnnnnnnnnnnnnnnnnnnnnnnnnnnnnnnnnnnnnnnnnnnnnnnnnnnnnnnnnnnnnnnnnnnnnnnnnnnnnnnnnnnnnnnnnnnnnnnnnnnnnnnnnnnnnnnnnnnnnnnnnnnnnnnnnnnnnnnnnnnnnnnnnnnnnnnnnnnnnnnnnnnnnnnnnnnnnnnnnnnnnnnnnnnnnnnnnnnnnnnnnnnnnnnnnnnnnnnnnnnnnnnnnnnnnnnnnnnnnnnnnnnnnnnnnnnnnnnnnnnnnnnnnnnnnnnnnnnnnnnnnnnnnnnnnnnnnnnnnnnnnnnnnnnnnnnnnnnnnnnnnnnnnnnnnnnnnnnnnnnnnnnnnnnnnnnnnnnnnnnnnnnnnnnnnnnnnnnnnnnnnnnnnnnnnnnnnnnnnnnnnnnnnnnnnnnnnnnnnnnnnnnnnnnnnnnnnnnnnnnnnnnnnnnnnnnnnnnnnnnnnnnnnnnnnnnnnnnnnnnnnnnnnnnnnnnnnnnnnnnnnnnnnnnnnnnnnnnnnnnnnnnnnnnnnnnnnnnnnnnnnnnnnnnnnnnnnnnnnnnnnnnnnnnnnnnnnnnnnnnnnnnnnnnnnnnnnnnnnnnnnnnnnnnnnnnnnnnnnnnnnnnnnnnnnnnnnnnnnnnnnnnnnnnnnnnnnnnnnnnnnnnnnnnnnnnnnnnnnnnnnnnnnnnnnnnnnnnnnnnnnnnnnnnnnnnnnnnnnnnnnnnnnnnnnnnnnnnnnnnnnnnnnnnnnnnnnnnnnnnnnnnnnnnnnnnnnnnnnnnnnnnnnnnnnnnnnnnnnnnnnnnnnnnnnnnnnnnnnnnnnnnnnnnnnnnnnnnnnnnnnnnnnnnnnnnnnnnnnnnnnnnnnnnnnnnnnnnnnnnnnnnnnnnnnnnnnnnnnnnnnnnnnnnnnnnnnnnnnnnnnnnnnnnnnnnnnnnnnnnnnnnnnnnnnnnnnnnnnnnnnnnnnnnnnnnnnnnnnnnnnnnnnnnnnnnnnnnnnnnnnnnnnnnnnnnnnnnnnnnnnnnnnnnnnnnnnnnnnnnnnnnnnnnnnnnnnnnnnnnnnnnnnnnnnnnnnnnnnnnnnnnnnnnnnnnnnnnnnnnnnnnnnnnnnnnnnnnnnnnnnnnnnnnnnnnnnnnnnnnnnnnnnnnnnnnnnnnnnnnnnnnnnnnnnnnnnnnnnnnnnnnnnnnnnnnnnnnnnnnnnnnnnnnnnnnnnnnnnnnnnnnnnnnnnnnnnnnnnnnnnnnnnnnnnnnnnnnnnnnnnnnnnnnnnnnnnnnnnnnnnnnnnnnnnnnnnnnnnnnnnnnnnnnnnnnnnnnnnnnnnnnnnnnnnnnnnnnnnnnnnnnnnnnnnnnnnnnnnnnnnnnnnnnnnnnnnnnnnnnnnnnnnnnnnnnnnnnnnnnnnnnnnnnnnnnnnnnnnnnnnnnnnnnnnnnnnnnnnnnnnnnnnnnnnnnnnnnnnnnnnnnnnnnnnnnnnnnnnnnnnnnnnnnnnnnnnnnnnnnnnnnnnnnnnnnnnnnnnnnnnnnnnnnnnnnnnnnnnnnnnnnnnnnnnnnnnnnnnnnnnnnnnnnnnnnnnnnnnnnnnnnnnnnnnnnnnnnnnnnnnnnnnnnnnnnnnnnnnnnnnnnnnnnnnnnnnnnnnnnnnnnnnnnnnnnnnnnnnnnnnnnnnnnnnnnnnnnnnnnnnnnnnnnnnnnnnnnnnnnnnnnnnnnnnnnnnnnnnnnnnnnnnnnnnnnnnnnnnnnnnnnnnnnnnnnnnnnnnnnnnnnnnnnnnnnnnnnnnnnnnnnnnnnnnnnnnnnnnnnnnnnnnnnnnnnnnnnnnnnnnnnnnnnnnnnnnnnnnnnnnnnnnnnnnnnnnnnnnnnnnnnnnnnnnnnnnnnnnnnnnnnnnnnnnnnnnnnnnnnnnnnnnnnnnnnnnnnnnnnnnnnnnnnnnnnnnnnnnnnnnnnnnnnnnnnnnnnnnnnnnnnnnnnnnnnnnnnnnnnnnnnnnnnnnnnnnnnnnnnnnnnnnnnnnnnnnnnnnnnnnnnnnnnnnnnnnnnnnnnnnnnnnnnnnnnnnnnnnnnnnnnnnnnnnnnnnnnnnnnnnnnnnnnnnnnnnnnnnnnnnnnnnnnnnnnnnnnnnnnnnnnnnnnnnnnnnnnnnnnnnnnnnnnnnnnnnnnnnnnnnnnnnnnnnnnnnnnnnnnnnnnnnnnnnnnnnnnnnnnnnnnnnnnnnnnnnnnnnnnnnnnnnnnnnnnnnnnnnnnnnnnnnnnnnnnnnnnnnnnnnnnnnnnnnnnnnnnnnnnnnnnnnnnnnnnnnnnnnnnnnnnnnnnnnnnnnnnnnnnnnnnnnnnnnnnnnnnnnnnnnnnnnnnnnnnnnnnnnnnnnnnnnnnnnnnnnnnnnnnnnnnnnnnnnnnnnnnnnnnnnnnnnnnnnnnnnnnnnnnnnnnnnnnnnnnnnnnnnnnnnnnnnnnnnnnnnnnnnnnnnnnnnnnnnnnnnnnnnnnnnnnnnnnnnnnnnnnnnnnnnnnnnnnnnnnnnnnnnnnnnnnnnnnnnnnnnnnnnnnnnnnnnnnnnnnnnnnnnnnnnnnnnnnnnnnnnnnnnnnnnnnnnnnnnnnnnnnnnnnnnnnnnnnnnnnnnnnnnnnnnnnnnnnnnnnnnnnnnnnnnnnnnnnnnnnnnnnnnnnnnnnnnnnnnnnnnnnnnnnnnnnnnnnnnnnnnnnnnnnnnnnnnnnnnnnnnnnnnnnnnnnnnnnnnnnnnnnnnnnnnnnnnnnnnnnnnnnnnnnnnnnnnnnnnnnnnnnnnnnnnnnnnnnnnnnnnnnnnnnnnnnnnnnnnnnnnnnnnnnnnnnnnnnnnnnnnnnnnnnnnnnnnnnnnnnnnnnnnnnnnnnnnnnnnnnnnnnnnnnnnnnnnnnnnnnnnnnnnnnnnnnnnnnnnnnnnnnnnnnnnnnnnnnnnnnnnnnnnnnnnnnnnnnnnnnnnnnnnnnnnnnnnnnnnnnnnnnnnnnnnnnnnnnnnnnnnnnnnnnnnnnnnnnnnnnnnnnnnnnnnnnnnnnnnnnnnnnnnnnnnnnnnnnnnnnnnnnnnnnnnnnnnnnnnnnnnnnnnnnnnnnnnnnnnnnnnnnnnnnnnnnnnnnnnnnnnnnnnnnnnnnnnnnnnnnnnnnnnnnnnnnnnnnnnnnnnnnnnnnnnnnnnnnnnnnnnnnnnnnnnnnnnnnnnnnnnnnnnnnnnnnnnnnnnnnnnnnnnnnnnnnnnnnnnnnnnnnnnnnnnnnnnnnnnnnnnnnnnnnnnnnnnnnnnnnnnnnnnnnnnnnnnnnnnnnnnnnnnnnnnnnnnnnnnnnnnnnnnnnnnnnnnnnnnnnnnnnnnnnnnnnnnnnnnnnnnnnnnnnnnnnnnnnnnnnnnnnnnnnnnnnnnnnnnnnnnnnnnnnnnnnnnnnnnnnnnnnnnnnnnnnnnnnnnnnnnnnnnnnnnnnnnnnnnnnnnnnnnnnnnnnnnnnnnnnnnnnnnnnnnnnnnnnnnnnnnnnnnnnnnnnnnnnnnnnnnnnnnnnnnnnnnnnnnnnnnnnnnnnnnnnnnnnnnnnnnnnnnnnnnnnnnnnnnnnnnnnnnnnnnnnnnnnnnnnnnnnnnnnnnnnnnnnnnnnnnnnnnnnnnnnnnnnnnnnnnnnnnnnnnnnnnnnnnnnnnnnnnnnnnnnnnnnnnnnnnnnnnnnnnnnnnnnnnnnnnnnnnnnnnnnnnnnnnnnnnnnnnnnnnnnnnnnnnnnnnnnnnnnnnnnnnnnnnnnnnnnnnnnnnnnnnnnnnnnnnnnnnnnnnnnnnnnnnnnnnnnnnnnnnnnnnnnnnnnnnnnnnnnnnnnnnnnnnnnnnnnnnnnnnnnnnnnnnnnnnnnnnnnnnnnnnnnnnnnnnnnnnnnnnnnnnnnnnnnnnnnnnnnnnnnnnnnnnnnnnnnnnnnnnnnnnnnnnnnnnnnnnnnnnnnnnnnnnnnnnnnnnnnnnnnnnnnnnnnnnnnnnnnnnnnnnnnnnnnnnnnnnnnnnnnnnnnnnnnnnnnnnnnnnnnnnnnnnnnnnnnnnnnnnnnnnnnnnnnnnnnnnnnnnnnnnnnnnnnnnnnnnnnnnnnnnnnnnnnnnnnnnnnnnnnnnnnnnnnnnnnnnnnnnnnnnnnnnnnnnnnnnnnnnnnnnnnnnnnnnnnnnnnnnnnnnnnnnnnnnnnnnnnnnnnnnnnnnnnnnnnnnnnnnnnnnnnnnnnnnnnnnnnnnnnnnnnnnnnnnnnnnnnnnnnnnnnnnnnnnnnnnnnnnnnnnnnnnnnnnnnnnnnnnnnnnnnnnnnnnnnnnnnnnnnnnnnnnnnnnnnnnnnnnnnnnnnnnnnnnnnnnnnnnnnnnnnnnnnnnnnnnnnnnnnnnnnnnnnnnnnnnnnnnnnnnnnnnnnnnnnnnnnnnnnnnnnnnnnnnnnnnnnnnnnnnnnnnnnnnnnnnnnnnnnnnnnnnnnnnnnnnnnnnnnnnnnnnnnnnnnnnnnnnnnnnnnnnnnnnnnnnnnnnnnnnnnnnnnnnnnnnnnnnnnnnnnnnnnnnnnnnnnnnnnnnnnnnnnnnnnnnnnnnnnnnnnnnnnnnnnnnnnnnnnnnnnnnnnnnnnnnnnnnnnnnnnnnnnnnnnnnnnnnnnnnnnnnnnnnnnnnnnnnnnnnnnnnnnnnnnnnnnnnnnnnnnnnnnnnnnnnnnnnnnnnnnnnnnnnnnnnnnnnnnnnnnnnnnnnnnnnnnnnnnnnnnnnnnnnnnnnnnnnnnnnnnnnnnnnnnnnnnnnnnnnnnnnnnnnnnnnnnnnnnnnnnnnnnnnnnnnnnnnnnnnnnnnnnnnnnnnnnnnnnnnnnnnnnnnnnnnnnnnnnnnnnnnnnnnnnnnnnnnnnnnnnnnnnnnnnnnnnnnnnnnnnnnnnnnnnnnnnnnnnnnnnnnnnnnnnnnnnnnnnnnnnnnnnnnnnnnnnnnnnnnnnnnnnnnnnnnnnnnnnnnnnnnnnnnnnnnnnnnnnnnnnnnnnnnnnnnnnnnnnnnnnnnnnnnnnnnnnnnnnnnnnnnnnnnnnnnnnnnnnnnnnnnnnnnnnnnnnnnnnnnnnnnnnnnnnnnnnnnnnnnnnnnnnnnnnnnnnnnnnnnnnnnnnnnnnnnnnnnnnnnnnnnnnnnnnnnnnnnnnnnnnnnnnnnnnnnnnnnnnnnnnnnnnnnnnnnnnnnnnnnnnnnnnnnnnnnnnnnnnnnnnnnnnnnnnnnnnnnnnnnnnnnnnnnnnnnnnnnnnnnnnnnnnnnnnnnnnnnnnnnnnnnnnnnnnnnnnnnnnnnnnnnnnnnnnnnnnnnnnnnnnnnnnnnnnnnnnnnnnnnnnnnnnnnnnnnnnnnnnnnnnnnnnnnnnnnnnnnnnnnnnnnnnnnnnnnnnnnnnnnnnnnnnnnnnnnnnnnnnnnnnnnnnnnnnnnnnnnnnnnnnnnnnnnnnnnnnnnnnnnnnnnnnnnnnnnnnnnnnnnnnnnnnnnnnnnnnnnnnnnnnnnnnnnnnnnnnnnnnnnnnnnnnnnnnnnnnnnnnnnnnnnnnnnnnnnnnnnnnnnnnnnnnnnnnnnnnnnnnnnnnnnnnnnnnnnnnnnnnnnnnnnnnnnnnnnnnnnnnnnnnnnnnnnnnnnnnnnnnnnnnnnnnnnnnnnnnnnnnnnnnnnnnnnnnnnnnnnnnnnnnnnnnnnnnnnnnnnnnnnnnnnnnnnnnnnnnnnnnnnnnnnnnnnnnnnnnnnnnnnnnnnnnnnnnnnnnnnnnnnnnnnnnnnnnnnnnnnnnnnnnnnnnnnnnnnnnnnnnnnnnnnnnnnnnnnnnnnnnnnnnnnnnnnnnnnnnnnnnnnnnnnnnnnnnnnnnnnnnnnnnnnnnnnnnnnnnnnnnnnnnnnnnnnnnnnnnnnnnnnnnnnnnnnnnnnnnnnnnnnnnnnnnnnnnnnnnnnnnnnnnnnnnnnnnnnnnnnnnnnnnnnnnnnnnnnnnnnnnnnnnnnnnnnnnnnnnnnnnnnnnnnnnnnnnnnnnnnnnnnnnnnnnnnnnnnnnnnnnnnnnnnnnnnnnnnnnnnnnnnnnnnnnnnnnnnnnnnnnnnnnnnnnnnnnnnnnnnnnnnnnnnnnnnnnnnnnnnnnnnnnnnnnnnnnnnnnnnnnnnnnnnnnnnnnnnnnnnnnnnnnnnnnnnnnnnnnnnnnnnnnnnnnnnnnnnnnnnnnnnnnnnnnnnnnnnnnnnnnnnnnnnnnnnnnnnnnnnnnnnnnnnnnnnnnnnnnnnnnnnnnnnnnnnnnnnnnnnnnnnnnnnnnnnnnnnnnnnnnnnnnnnnnnnnnnnnnnnnnnnnnnnnnnnnnnnnnnnnnnnnnnnnnnnnnnnnnnnnnnnnnnnnnnnnnnnnnnnnnnnnnnnnnnnnnnnnnnnnnnnnnnnnnnnnnnnnnnnnnnnnnnnnnnnnnnnnnnnnnnnnnnnnnnnnnnnnnnnnnnnnnnnnnnnnnnnnnnnnnnnnnnnnnnnnnnnnnnnnnnnnnnnnnnnnnnnnnnnnnnnnnnnnnnnnnnnnnnnnnnnnnnnnnnnnnnnnnnnnnnnnnnnnnnnnnnnnnnnnnnnnnnnnnnnnnnnnnnnnnnnnnnnnnnnnnnnnnnnnnnnnnnnnnnnnnnnnnnnnnnnnnnnnnnnnnnnnnnnnnnnnnnnnnnnnnnnnnnnnnnnnnnnnnnnnnnnnnnnnnnnnnnnnnnnnnnnnnnnnnnnnnnnnnnnnnnnnnnnnnnnnnnnnnnnnnnnnnnnnnnnnnnnnnnnnnnnnnnnnnnnnnnnnnnnnnnnnnnnnnnnnnnnnnnnnnnnnnnnnnnnnnnnnnnnnnnnnnnnnnnnnnnnnnnnnnnnnnnnnnnnnnnnnnnnnnnnnnnnnnnnnnnnnnnnnnnnnnnnnnnnnnnnnnnnnnnnnnnnnnnnnnnnnnnnnnnnnnnnnnnnnnnnnnnnnnnnnnnnnnnnnnnnnnnnnnnnnnnnnnnnnnnnnnnnnnnnnnnnnnnnnnnnnnnnnnnnnnnnnnnnnnnnnnnnnnnnnnnnnnnnnnnnnnnnnnnnnnnnnnnnnnnnnnnnnnnnnnnnnnnnnnnnnnnnnnnnnnnnnnnnnnnnnnnnnnnnnnnnnnnnnnnnnnnnnnnnnnnnnnnnnnnnnnnnnnnnnnnnnnnnnnnnnnnnnnnnnnnnnnnnnnnnnnnnnnnnnnnnnnnnnnnnnnnnnnnnnnnnnnnnnnnnnnnnnnnnnnnnnnnnnnnnnnnnnnnnnnnnnnnnnnnnnnnnnnnnnnnnnnnnnnnnnnnnnnnnnnnnnnnnnnnnnnnnnnnnnnnnnnnnnnnnnnnnnnnnnnnnnnnnnnnnnnnnnnnnnnnnnnnnnnnnnnnnnnnnnnnnnnnnnnnnnnnnnnnnnnnnnnnnnnnnnnnnnnnnnnnnnnnnnnnnnnnnnnnnnnnnnnnnnnnnnnnnnnnnnnnnnnnnnnnnnnnnnnnnnnnnnnnnnnnnnnnnnnnnnnnnnnnnnnnnnnnnnnnnnnnnnnnnnnnnnnnnnnnnnnnnnnnnnnnnnnnnnnnnnnnnnnnnnnnnnnnnnnnnnnnnnnnnnnnnnnnnnnnnnnnnnnnnnnnnnnnnnnnnnnnnnnnnnnnnnnnnnnnnnnnnnnnnnnnnnnnnnnnnnnnnnnnnnnnnnnnnnnnnnnnnnnnnnnnnnnnnnnnnnnnnnnnnnnnnnnnnnnnnnnnnnnnnnnnnnnnnnnnnnnnnnnnnnnnnnnnnnnnnnnnnnnnnnnnnnnnnnnnnnnnnnnnnnnnnnnnnnnnnnnnnnnnnnnnnnnnnnnnnnnnnnnnnnnnnnnnnnnnnnnnnnnnnnnnnnnnnnnnnnnnnnnnnnnnnnnnnnnnnnnnnnnnnnnnnnnnnnnnnnnnnnnnnnnnnnnnnnnnnnnnnnnnnnnnnnnnnnnnnnnnnnnnnnnnnnnnnnnnnnnnnnnnnnnnnnnnnnnnnnnnnnnnnnnnnnnnnnnnnnnnnnnnnnnnnnnnnnnnnnnnnnnnnnnnnnnnnnnnnnnnnnnnnnnnnnnnnnnnnnnnnnnnnnnnnnnnnnnnnnnnnnnnnnnnnnnnnnnnnnnnnnnnnnnnnnnnnnnnnnnnnnnnnnnnnnnnnnnnnnnnnnnnnnnnnnnnnnnnnnnnnnnnnnnnnnnnnnnnnnnnnnnnnnnnnnnnnnnnnnnnnnnnnnnnnnnnnnnnnnnnnnnnnnnnnnnnnnnnnnnnnnnnnnnnnnnnnnnnnnnnnnnnnnnnnnnnnnnnnnnnnnnnnnnnnnnnnnnnnnnnnnnnnnnnnnnnnnnnnnnnnnnnnnnnnnnnnnnnnnnnnnnnnnnnnnnnnnnnnnnnnnnnnnnnnnnnnnnnnnnnnnnnnnnnnnnnnnnnnnnnnnnnnnnnnnnnnnnnnnnnnnnnnnnnnnnnnnnnnnnnnnnnnnnnnnnnnnnnnnnnnnnnnnnnnnnnnnnnnnnnnnnnnnnnnnnnnnnnnnnnnnnnnnnnnnnnnnnnnnnnnnnnnnnnnnnnnnnnnnnnnnnnnnnnnnnnnnnnnnnnnnnnnnnnnnnnnnnnnnnnnnnnnnnnnnnnnnnnnnnnnnnnnnnnnnnnnnnnnnnnnnnnnnnnnnnnnnnnnnnnnnnnnnnnnnnnnnnnnnnnnnnnnnnnnnnnnnnnnnnnnnnnnnnnnnnnnnnnnnnnnnnnnnnnnnnnnnnnnnnnnnnnnnnnnnnnnnnnnnnnnnnnnnnnnnnnnnnnnnnnnnnnnnnnnnnnnnnnnnnnnnnnnnnnnnnnnnnnnnnnnnnnnnnnnnnnnnnnnnnnnnnnnnnnnnnnnnnnnnnnnnnnnnnnnnnnnnnnnnnnnnnnnnnnnnnnnnnnnnnnnnnnnnnnnnnnnnnnnnnnnnnnnnnnnnnnnnnnnnnnnnnnnnnnnnnnnnnnnnnnnnnnnnnnnnnnnnnnnnnnnnnnnnnnnnnnnnnnnnnnnnnnnnnnnnnnnnnnnnnnnnnnnnnnnnnnnnnnnnnnnnnnnnnnnnnnnnnnnnnnnnnnnnnnnnnnnnnnnnnnnnnnnnnnnnnnnnnnnnnnnnnnnnnnnnnnnnnnnnnnnnnnnnnnnnnnnnnnnnnnnnnnnnnnnnnnnnnnnnnnnnnnnnnnnnnnnnnnnnnnnnnnnnnnnnnnnnnnnnnnnnnnnnnnnnnnnnnnnnnnnnnnnnnnnnnnnnnnnnnnnnnnnnnnnnnnnnnnnnnnnnnnnnnnnnnnnnnnnnnnnnnnnnnnnnnnnnnnnnnnnnnnnnnnnnnnnnnnnnnnnnnnnnnnnnnnnnnnnnnnnnnnnnnnnnnnnnnnnnnnnnnnnnnnnnnnnnnnnnnnnnnnnnnnnnnnnnnnnnnnnnnnnnnnnnnnnnnnnnnnnnnnnnnnnnnnnnnnnnnnnnnnnnnnnnnnnnnnnnnnnnnnnnnnnnnnnnnnnnnnnnnnnnnnnnnnnnnnnnnnnnnnnnnnnnnnnnnnnnnnnnnnnnnnnnnnnnnnnnnnnnnnnnnnnnnnnnnnnnnnnnnnnnnnnnnnnnnnnnnnnnnnnnnnnnnnnnnnnnnnnnnnnnnnnnnnnnnnnnnnnnnnnnnnnnnnnnnnnnnnnnnnnnnnnnnnnnnnnnnnnnnnnnnnnnnnnnnnnnnnnnnnnnnnnnnnnnnnnnnnnnnnnnnnnnnnnnnnnnnnnnnnnnnnnnnnnnnnnnnnnnnnnnnnnnnnnnnnnnnnnnnnnnnnnnnnnnnnnnnnnnnnnnnnnnnnnnnnnnnnnnnnnnnnnnnnnnnnnnnnnnnnnnnnnnnnnnnnnnnnnnnnnnnnnnnnnnnnnnnnnnnnnnnnnnnnnnnnnnnnnnnnnnnnnnnnnnnnnnnnnnnnnnnnnnnnnnnnnnnnnnnnnnnnnnnnnnnnnnnnnnnnnnnnnnnnnnnnnnnnnnnnnnnnnnnnnnnnnnnnnnnnnnnnnnnnnnnnnnnnnnnnnnnnnnnnnnnnnnnnnnnnnnnnnnnnnnnnnnnnnnnnnnnnnnnnnnnnnnnnnnnnnnnnnnnnnnnnnnnnnnnnnnnnnnnnnnnnnnnnnnnnnnnnnnnnnnnnnnnnnnnnnnnnnnnnnnnnnnnnnnnnnnnnnnnnnnnnnnnnnnnnnnnnnnnnnnnnnnnnnnnnnnnnnnnnnnnnnnnnnnnnnnnnnnnnnnnnnnnnnnnnnnnnnnnnnnnnnnnnnnnnnnnnnnnnnnnnnnnnnnnnnnnnnnnnnnnnnnnnnnnnnnnnnnnnnnnnnnnnnnnnnnnnnnnnnnnnnnnnnnnnnnnnnnnnnnnnnnnnnnnnnnnnnnnnnnnnnnnnnnnnnnnnnnnnnnnnnnnnnnnnnnnnnnnnnnnnnnnnnnnnnnnnnnnnnnnnnnnnnnnnnnnnnnnnnnnnnnnnnnnnnnnnnnnnnnnnnnnnnnnnnnnnnnnnnnnnnnnnnnnnnnnnnnnnnnnnnnnnnnnnnnnnnnnnnnnnnnnnnnnnnnnnnnnnnnnnnnnnnnnnnnnnnnnnnnnnnnnnnnnnnnnnnnnnnnnnnnnnnnnnnnnnnnnnnnnnnnnnnnnnnnnnnnnnnnnnnnnnnnnnnnnnnnnnnnnnnnnnnnnnnnnnnnnnnnnnnnnnnnnnnnnnnnnnnnnnnnnnnnnnnnnnnnnnnnnnnnnnnnnnnnnnnnnnnnnnnnnnnnnnnnnnnnnnnnnnnnnnnnnnnnnnnnnnnnnnnnnnnnnnnnnnnnnnnnnnnnnnnnnnnnnnnnnnnnnnnnnnnnnnnnnnnnnnnnnnnnnnnnnnnnnnnnnnnnnnnnnnnnnnnnnnnnnnnnnnnnnnnnnnnnnnnnnnnnnnnnnnnnnnnnnnnnnnnnnnnnnnnnnnnnnnnnnnnnnnnnnnnnnnnnnnnnnnnnnnnnnnnnnnnnnnnnnnnnnnnnnnnnnnnnnnnnnnnnnnnnnnnnnnnnnnnnnnnnnnnnnnnnnnnnnnnnnnnnnnnnnnnnnnnnnnnnnnnnnnnnnnnnnnnnnnnnnnnnnnnnnnnnnnnnnnnnnnnnnnnnnnnnnnnnnnnnnnnnnnnnnnnnnnnnnnnnnnnnnnnnnnnnnnnnnnnnnnnnnnnnnnnnnnnnnnnnnnnnnnnnnnnnnnnnnnnnnnnnnnnnnnnnnnnnnnnnnnnnnnnnnnnnnnnnnnnnnnnnnnnnnnnnnnnnnnnnnnnnnnnnnnnnnnnnnnnnnnnnnnnnnnnnnnnnnnnnnnnnnnnnnnnnnnnnnnnnnnnnnnnnnnnnnnnnnnnnnnnnnnnnnnnnnnnnnnnnnnnnnnnnnnnnnnnnnnnnnnnnnnnnnnnnnnnnnnnnnnnnnnnnnnnnnnnnnnnnnnnnnnnnnnnnnnnnnnnnnnnnnnnnnnnnnnnnnnnnnnnnnnnnnnnnnnnnnnnnnnnnnnnnnnnnnnnnnnnnnnnnnnnnnnnnnnnnnnnnnnnnnnnnnnnnnnnnnnnnnnnnnnnnnnnnnnnnnnnnnnnnnnnnnnnnnnnnnnnnnnnnnnnnnnnnnnnnnnnnnnnnnnnnnnnnnnnnnnnnnnnnnnnnnnnnnnnnnnnnnnnnnnnnnnnnnnnnnnnnnnnnnnnnnnnnnnnnnnnnnnnnnnnnnnnnnnnnnnnnnnnnnnnnnnnnnnnnnnnnnnnnnnnnnnnnnnnnnnnnnnnnnnnnnnnnnnnnnnnnnnnnnnnnnnnnnnnnnnnnnnnnnnnnnnnnnnnnnnnnnnnnnnnnnnnnnnnnnnnnnnnnnnnnnnnnnnnnnnnnnnnnnnnnnnnnnnnnnnnnnnnnnnnnnnnnnnnnnnnnnnnnnnnnnnnnnnnnnnnnnnnnnnnnnnnnnnnnnnnnnnnnnnnnnnnnnnnnnnnnnnnnnnnnnnnnnnnnnnnnnnnnnnnnnnnnnnnnnnnnnnnnnnnnnnnnnnnnnnnnnnnnnnnnnnnnnnnnnnnnnnnnnnnnnnnnnnnnnnnnnnnnnnnnnnnnnnnnnnnnnnnnnnnnnnnnnnnnnnnnnnnnnnnnnnnnnnnnnnnnnnnnnnnnnnnnnnnnnnnnnnnnnnnnnnnnnnnnnnnnnnnnnnnnnnnnnnnnnnnnnnnnnnnnnnnnnnnnnnnnnnnnnnnnnnnnnnnnnnnnnnnnnnnnnnnnnnnnnnnnnnnnnnnnnnnnnnnnnnnnnnnnnnnnnnnnnnnnnnnnnnnnnnnnnnnnnnnnnnnnnnnnnnnnnnnnnnnnnnnnnnnnnnnnnnnnnnnnnnnnnnnnnnnnnnnnnnnnnnnnnnnnnnnnnnnnnnnnnnnnnnnnnnnnnnnnnnnnnnnnnnnnnnnnnnnnnnnnnnnnnnnnnnnnnnnnnnnnnnnnnnnnnnnnnnnnnnnnnnnnnnnnnnnnnnnnnnnnnnnnnnnnnnnnnnnnnnnnnnnnnnnnnnnnnnnnnnnnnnnnnnnnnnnnnnnnnnnnnnnnnnnnnnnnnnnnnnnnnnnnnnnnnnnnnnnnnnnnnnnnnnnnnnnnnnnnnnnnnnnnnnnnnnnnnnnnnnnnnnnnnnnnnnnnnnnnnnnnnnnnnnnnnnnnnnnnnnnnnnnnnnnnnnnnnnnnnnnnnnnnnnnnnnnnnnnnnnnnnnnnnnnnnnnnnnnnnnnnnnnnnnnnnnnnnnnnnnnnnnnnnnnnnnnnnnnnnnnnnnnnnnnnnnnnnnnnnnnnnnnnnnnnnnnnnnnnnnnnnnnnnnnnnnnnnnnnnnnnnnnnnnnnnnnnnnnnnnnnnnnnnnnnnnnnnnnnnnnnnnnnnnnnnnnnnnnnnnnnnnnnnnnnnnnnnnnnnnnnnnnnnnnnnnnnnnnnnnnnnnnnnnnnnnnnnnnnnnnnnnnnnnnnnnnnnnnnnnnnnnnnnnnnnnnnnnnnnnnnnnnnnnnnnnnnnnnnnnnnnnnnnnnnnnnnnnnnnnnnnnnnnnnnnnnnnnnnnnnnnnnnnnnnnnnnnnnnnnnnnnnnnnnnnnnnnnnnnnnnnnnnnnnnnnnnnnnnnnnnnnnnnnnnnnnnnnnnnnnnnnnnnnnnnnnnnnnnnnnnnnnnnnnnnnnnnnnnnnnnnnnnnnnnnnnnnnnnnnnnnnnnnnnnnnnnnnnnnnnnnnnnnnnnnnnnnnnnnnnnnnnnnnnnnnnnnnnnnnnnnnnnnnnnnnnnnnnnnnnnnnnnnnnnnnnnnnnnnnnnnnnnnnnnnnnnnnnnnnnnnnnnnnnnnnnnnnnnnnnnnnnnnnnnnnnnnnnnnnnnnnnnnnnnnnnnnnnnnnnnnnnnnnnnnnnnnnnnnnnnnnnnnnnnnnnnnnnnnnnnnnnnnnnnnnnnnnnnnnnnnnnnnnnnnnnnnnnnnnnnnnnnnnnnnnnnnnnnnnnnnnnnnnnnnnnnnnnnnnnnnnnnnnnnnnnnnnnnnnnnnnnnnnnnnnnnnnnnnnnnnnnnnnnnnnnnnnnnnnnnnnnnnnnnnnnnnnnnnnnnnnnnnnnnnnnnnnnnnnnnnnnnnnnnnnnnnnnnnnnnnnnnnnnnnnnnnnnnnnnnnnnnnnnnnnnnnnnnnnnnnnnnnnnnnnnnnnnnnnnnnnnnnnnnnnnnnnnnnnnnnnnnnnnnnnnnnnnnnnnnnnnnnnnnnnnnnnnnnnnnnnnnnnnnnnnnnnnnnnnnnnnnnnnnnnnnnnnnnnnnnnnnnnnnnnnnnnnnnnnnnnnnnnnnnnnnnnnnnnnnnnnnnnnnnnnnnnnnnnnnnnnnnnnnnnnnnnnnnnnnnnnnnnnnnnnnnnnnnnnnnnnnnnnnnnnnnnnnnnnnnnnnnnnnnnnnnnnnnnnnnnnnnnnnnnnnnnnnnnnnnnnnnnnnnnnnnnnnnnnnnnnnnnnnnnnnnnnnnnnnnnnnnnnnnnnnnnnnnnnnnnnnnnnnnnnnnnnnnnnnnnnnnnnnnnnnnnnnnnnnnnnnnnnnnnnnnnnnnnnnnnnnnnnnnnnnnnnnnnnnnnnnnnnnnnnnnnnnnnnnnnnnnnnnnnnnnnnnnnnnnnnnnnnnnnnnnnnnnnnnnnnnnnnnnnnnnnnnnnnnnnnnnnnnnnnnnnnnnnnnnnnnnnnnnnnnnnnnnnnnnnnnnnnnnnnnnnnnnnnnnnnnnnnnnnnnnnnnnnnnnnnnnnnnnnnnnnnnnnnnnnnnnnnnnnnnnnnnnnnnnnnnnnnnnnnnnnnnnnnnnnnnnnnnnnnnnnnnnnnnnnnnnnnnnnnnnnnnnnnnnnnnnnnnnnnnnnnnnnnnnnnnnnnnnnnnnnnnnnnnnnnnnnnnnnnnnnnnnnnnnnnnnnnnnnnnnnnnnnnnnnnnnnnnnnnnnnnnnnnnnnnnnnnnnnnnnnnnnnnnnnnnnnnnnnnnnnnnnnnnnnnnnnnnnnnnnnnnnnnnnnnnnnnnnnnnnnnnnnnnnnnnnnnnnnnnnnnnnnnnnnnnnnnnnnnnnnnnnnnnnnnnnnnnnnnnnnnnnnnnnnnnnnnnnnnnnnnnnnnnnnnnnnnnnnnnnnnnnnnnnnnnnnnnnnnnnnnnnnnnnnnnnnnnnnnnnnnnnnnnnnnnnnnnnnnnnnnnnnnnnnnnnnnnnnnnnnnnnnnnnnnnnnnnnnnnnnnnnnnnnnnnnnnnnnnnnnnnnnnnnnnnnnnnnnnnnnnnnnnnnnnnnnnnnnnnnnnnnnnnnnnnnnnnnnnnnnnnnnnnnnnnnnnnnnnnnnnnnnnnnnnnnnnnnnnnnnnnnnnnnnnnnnnnnnnnnnnnnnnnnnnnnnnnnnnnnnnnnnnnnnnnnnnnnnnnnnnnnnnnnnnnnnnnnnnnnnnnnnnnnnnnnnnnnnnnnnnnnnnnnnnnnnnnnnnnnnnnnnnnnnnnnnnnnnnnnnnnnnnnnnnnnnnnnnnnnnnnnnnnnnnnnnnnnnnnnnnnnnnnnnnnnnnnnnnnnnnnnnnnnnnnnnnnnnnnnnnnnnnnnnnnnnnnnnnnnnnnnnnnnnnnnnnnnnnnnnnnnnnnnnnnnnnnnnnnnnnnnnnnnnnnnnnnnnnnnnnnnnnnnnnnnnnnnnnnnnnnnnnnnnnnnnnnnnnnnnnnnnnnnnnnnnnnnnnnnnnnnnnnnnnnnnnnnnnnnnnnnnnnnnnnnnnnnnnnnnnnnnnnnnnnnnnnnnnnnnnnnnnnnnnnnnnnnnnnnnnnnnnnnnnnnnnnnnnnnnnnnnnnnnnnnnnnnnnnnnnnnnnnnnnnnnnnnnnnnnnnnnnnnnnnnnnnnnnnnnnnnnnnnnnnnnnnnnnnnnnnnnnnnnnnnnnnnnnnnnnnnnnnnnnnnnnnnnnnnnnnnnnnnnnnnnnnnnnnnnnnnnnnnnnnnnnnnnnnnnnnnnnnnnnnnnnnnnnnnnnnnnnnnnnnnnnnnnnnnnnnnnnnnnnnnnnnnnnnnnnnnnnnnnnnnnnnnnnnnnnnnnnnnnnnnnnnnnnnnnnnnnnnnnnnnnnnnnnnnnnnnnnnnnnnnnnnnnnnnnnnnnnnnnnnnnnnnnnnnnnnnnnnnnnnnnnnnnnnnnnnnnnnnnnnnnnnnnnnnnnnnnnnnnnnnnnnnnnnnnnnnnnnnnnnnnnnnnnnnnnnnnnnnnnnnnnnnnnnnnnnnnnnnnnnnnnnnnnnnnnnnnnnnnnnnnnnnnnnnnnnnnnnnnnnnnnnnnnnnnnnnnnnnnnnnnnnnnnnnnnnnnnnnnnnnnnnnnnnnnnnnnnnnnnnnnnnnnnnnnnnnnnnnnnnnnnnnnnnnnnnnnnnnnnnnnnnnnnnnnnnnnnnnnnnnnnnnnnnnnnnnnnnnnnnnnnnnnnnnnnnnnnnnnnnnnnnnnnnnnnnnnnnnnnnnnnnnnnnnnnnnnnnnnnnnnnnnnnnnnnnnnnnnnnnnnnnnnnnnnnnnnnnnnnnnnnnnnnnnnnnnnnnnnnnnnnnnnnnnnnnnnnnnnnnnnnnnnnnnnnnnnnnnnnnnnnnnnnnnnnnnnnnnnnnnnnnnnnnnnnnnnnnnnnnnnnnnnnnnnnnnnnnnnnnnnnnnnnnnnnnnnnnnnnnnnnnnnnnnnnnnnnnnnnnnnnnnnnnnnnnnnnnnnnnnnnnnnnnnnnnnnnnnnnnnnnnnnnnnnnnnnnnnnnnnnnnnnnnnnnnnnnnnnnnnnnnnnnnnnnnnnnnnnnnnnnnnnnnnnnnnnnnnnnnnnnnnnnnnnnnnnnnnnnnnnnnnnnnnnnnnnnnnnnnnnnnnnnnnnnnnnnnnnnnnnnnnnnnnnnnnnnnnnnnnnnnnnnnnnnnnnnnnnnnnnnnnnnnnnnnnnnnnnnnnnnnnnnnnnnnnnnnnnnnnnnnnnnnnnnnnnnnnnnnnnnnnnnnnnnnnnnnnnnnnnnnnnnnnnnnnnnnnnnnnnnnnnnnnnnnnnnnnnnnnnnnnnnnnnnnnnnnnnnnnnnnnnnnnnnnnnnnnnnnnnnnnnnnnnnnnnnnnnnnnnnnnnnnnnnnnnnnnnnnnnnnnnnnnnnnnnnnnnnnnnnnnnnnnnnnnnnnnnnnnnnnnnnnnnnnnnnnnnnnnnnnnnnnnnnnnnnnnnnnnnnnnnnnnnnnnnnnnnnnnnnnnnnnnnnnnnnnnnnnnnnnnnnnnnnnnnnnnnnnnnnnnnnnnnnnnnnnnnnnnnnnnnnnnnnnnnnnnnnnnnnnnnnnnnnnnnnnnnnnnnnnnnnnnnnnnnnnnnnnnnnnnnnnnnnnnnnnnnnnnnnnnnnnnnnnnnnnnnnnnnnnnnnnnnnnnnnnnnnnnnnnnnnnnnnnnnnnnnnnnnnnnnnnnnnnnnnnnnnnnnnnnnnnnnnnnnnnnnnnnnnnnnnnnnnnnnnnnnnnnnnnnnnnnnnnnnnnnnnnnnnnnnnnnnnnnnnnnnnnnnnnnnnnnnnnnnnnnnnnnnnnnnnnnnnnnnnnnnnnnnnnnnnnnnnnnnnnnnnnnnnnnnnnnnnnnnnnnnnnnnnnnnnnnnnnnnnnnnnnnnnnnnnnnnnnnnnnnnnnnnnnnnnnnnnnnnnnnnnnnnnnnnnnnnnnnnnnnnnnnnnnnnnnnnnnnnnnnnnnnnnnnnnnnnnnnnnnnnnnnnnnnnnnnnnnnnnnnnnnnnnnnnnnnnnnnnnnnnnnnnnnnnnnnnnnnnnnnnnnnnnnnnnnnnnnnnnnnnnnnnnnnnnnnnnnnnnnnnnnnnnnnnnnnnnnnnnnnnnnnnnnnnnnnnnnnnnnnnnnnnnnnnnnnnnnnnnnnnnnnnnnnnnnnnnnnnnnnnnnnnnnnnnnnnnnnnnnnnnnnnnnnnnnnnnnnnnnnnnnnnnnnnnnnnnnnnnnnnnnnnnnnnnnnnnnnnnnnnnnnnnnnnnnnnnnnnnnnnnnnnnnnnnnnnnnnnnnnnnnnnnnnnnnnnnnnnnnnnnnnnnnnnnnnnnnnnnnnnnnnnnnnnnnnnnnnnnnnnnnnnnnnnnnnnnnnnnnnnnnnnnnnnnnnnnnnnnnnnnnnnnnnnnnnnnnnnnnnnnnnnnnnnnnnnnnnnnnnnnnnnnnnnnnnnnnnnnnnnnnnnnnnnnnnnnnnnnnnnnnnnnnnnnnnnnnnnnnnnnnnnnnnnnnnnnnnnnnnnnnnnnnnnnnnnnnnnnnnnnnnnnnnnnnnnnnnnnnnnnnnnnnnnnnnnnnnnnnnnnnnnnnnnnnnnnnnnnnnnnnnnnnnnnnnnnnnnnnnnnnnnnnnnnnnnnnnnnnnnnnnnnnnnnnnnnnnnnnnnnnnnnnnnnnnnnnnnnnnnnnnnnnnnnnnnnnnnnnnnnnnnnnnnnnnnnnnnnnnnnnnnnnnnnnnnnnnnnnnnnnnnnnnnnnnnnnnnnnnnnnnnnnnnnnnnnnnnnnnnnnnnnnnnnnnnnnnnnnnnnnnnnnnnnnnnnnnnnnnnnnnnnnnnnnnnnnnnnnnnnnnnnnnnnnnnnnnnnnnnnnnnnnnnnnnnnnnnnnnnnnnnnnnnnnnnnnnnnnnnnnnnnnnnnnnnnnnnnnnnnnnnnnnnnnnnnnnnnnnnnnnnnnnnnnnnnnnnnnnnnnnnnnnnnnnnnnnnnnnnnnnnnnnnnnnnnnnnnnnnnnnnnnnnnnnnnnnnnnnnnnnnnnnnnnnnnnnnnnnnnnnnnnnnnnnnnnnnnnnnnnnnnnnnnnnnnnnnnnnnnnnnnnnnnnnnnnnnnnnnnnnnnnnnnnnnnnnnnnnnnnnnnnnnnnnnnnnnnnnnnnnnnnnnnnnnnnnnnnnnnnnnnnnnnnnnnnnnnnnnnnnnnnnnnnnnnnnnnnnnnnnnnnnnnnnnnnnnnnnnnnnnnnnnnnnnnnnnnnnnnnnnnnnnnnnnnnnnnnnnnnnnnnnnnnnnnnnnnnnnnnnnnnnnnnnnnnnnnnnnnnnnnnnnnnnnnnnnnnnnnnnnnnnnnnnnnnnnnnnnnnnnnnnnnnnnnnnnnnnnnnnnnnnnnnnnnnnnnnnnnnnnnnnnnnnnnnnnnnnnnnnnnnnnnnnnnnnnnnnnnnnnnnnnnnnnnnnnnnnnnnnnnnnnnnnnnnnnnnnnnnnnnnnnnnnnnnnnnnnnnnnnnnnnnnnnnnnnnnnnnnnnnnnnnnnnnnnnnnnnnnnnnnnnnnnnnnnnnnnnnnnnnnnnnnnnnnnnnnnnnnnnnnnnnnnnnnnnnnnnnnnnnnnnnnnnnnnnnnnnnnnnnnnnnnnnnnnnnnnnnnnnnnnnnnnnnnnnnnnnnnnnnnnnnnnnnnnnnnnnnnnnnnnnnnnnnnnnnnnnnnnnnnnnnnnnnnnnnnnnnnnnnnnnnnnnnnnnnnnnnnnnnnnnnnnnnnnnnnnnnnnnnnnnnnnnnnnnnnnnnnnnnnnnnnnnnnnnnnnnnnnnnnnnnnnnnnnnnnnnnnnnnnnnnnnnnnnnnnnnnnnnnnnnnnnnnnnnnnnnnnnnnnnnnnnnnnnnnnnnnnnnnnnnnnnnnnnnnnnnnnnnnnnnnnnnnnnnnnnnnnnnnnnnnnnnnnnnnnnnnnnnnnnnnnnnnnnnnnnnnnnnnnnnnnnnnnnnnnnnnnnnnnnnnnnnnnnnnnnnnnnnnnnnnnnnnnnnnnnnnnnnnnnnnnnnnnnnnnnnnnnnnnnnnnnnnnnnnnnnnnnnnnnnnnnnnnnnnnnnnnnnnnnnnnnnnnnnnnnnnnnnnnnnnnnnnnnnnnnnnnnnnnnnnnnnnnnnnnnnnnnnnnnnnnnnnnnnnnnnnnnnnnnnnnnnnnnnnnnnnnnnnnnnnnnnnnnnnnnnnnnnnnnnnnnnnnnnnnnnnnnnnnnnnnnnnnnnnnnnnnnnnnnnnnnnnnnnnnnnnnnnnnnnnnnnnnnnnnnnnnnnnnnnnnnnnnnnnnnnnnnnnnnnnnnnnnnnnnnnnnnnnnnnnnnnnnnnnnnnnnnnnnnnnnnnnnnnnnnnnnnnnnnnnnnnnnnnnnnnnnnnnnnnnnnnnnnnnnnnnnnnnnnnnnnnnnnnnnnnnnnnnnnnnnnnnnnnnnnnnnnnnnnnnnnnnnnnnnnnnnnnnnnnnnnnnnnnnnnnnnnnnnnnnnnnnnnnnnnnnnnnnnnnnnnnnnnnnnnnnnnnnnnnnnnnnnnnnnnnnnnnnnnnnnnnnnnnnnnnnnnnnnnnnnnnnnnnnnnnnnnnnnnnnnnnnnnnnnnnnnnnnnnnnnnnnnnnnnnnnnnnnnnnnnnnnnnnnnnnnnnnnnnnnnnnnnnnnnnnnnnnnnnnnnnnnnnnnnnnnnnnnnnnnnnnnnnnnnnnnnnnnnnnnnnnnnnnnnnnnnnnnnnnnnnnnnnnnnnnnnnnnnnnnnnnnnnnnnnnnnnnnnnnnnnnnnnnnnnnnnnnnnnnnnnnnnnnnnnnnnnnnnnnnnnnnnnnnnnnnnnnnnnnnnnnnnnnnnnnnnnnnnnnnnnnnnnnnnnnnnnnnnnnnnnnnnnnnnnnnnnnnnnnnnnnnnnnnnnnnnnnnnnnnnnnnnnnnnnnnnnnnnnnnnnnnnnnnnnnnnnnnnnnnnnnnnnnnnnnnnnnnnnnnnnnnnnnnnnnnnnnnnnnnnnnnnnnnnnnnnnnnnnnnnnnnnnnnnnnnnnnnnnnnnnnnnnnnnnnnnnnnnnnnnnnnnnnnnnnnnnnnnnnnnnnnnnnnnnnnnnnnnnnnnnnnnnnnnnnnnnnnnnnnnnnnnnnnnnnnnnnnnnnnnnnnnnnnnnnnnnnnnnnnnnnnnnnnnnnnnnnnnnnnnnnnnnnnnnnnnnnnnnnnnnnnnnnnnnnnnnnnnnnnnnnnnnnnnnnnnnnnnnnnnnnnnnnnnnnnnnnnnnnnnnnnnnnnnnnnnnnnnnnnnnnnnnnnnnnnnnnnnnnnnnnnnnnnnnnnnnnnnnnnnnnnnnnnnnnnnnnnnnnnnnnnnnnnnnnnnnnnnnnnnnnnnnnnnnnnnnnnnnnnnnnnnnnnnnnnnnnnnnnnnnnnnnnnnnnnnnnnnnnnnnnnnnnnnnnnnnnnnnnnnnnnnnnnnnnnnnnnnnnnnnnnnnnnnnnnnnnnnnnnnnnnnnnnnnnnnnnnnnnnnnnnnnnnnnnnnnnnnnnnnnnnnnnnnnnnnnnnnnnnnnnnnnnnnnnnnnnnnnnnnnnnnnnnnnnnnnnnnnnnnnnnnnnnnnnnnnnnnnnnnnnnnnnnnnnnnnnnnnnnnnnnnnnnnnnnnnnnnnnnnnnnnnnnnnnnnnnnnnnnnnnnnnnnnnnnnnnnnnnnnnnnnnnnnnnnnnnnnnnnnnnnnnnnnnnnnnnnnnnnnnnnnnnnnnnnnnnnnnnnnnnnnnnnnnnnnnnnnnnnnnnnnnnnnnnnnnnnnnnnnnnnnnnnnnnnnnnnnnnnnnnnnnnnnnnnnnnnnnnnnnnnnnnnnnnnnnnnnnnnnnnnnnnnnnnnnnnnnnnnnnnnnnnnnnnnnnnnnnnnnnnnnnnnnnnnnnnnnnnnnnnnnnnnnnnnnnnnnnnnnnnnnnnnnnnnnnnnnnnnnnnnnnnnnnnnnnnnnnnnnnnnnnnnnnnnnnnnnnnnnnnnnnnnnnnnnnnnnnnnnnnnnnnnnnnnnnnnnnnnnnnnnnnnnnnnnnnnnnnnnnnnnnnnnnnnnnnnnnnnnnnnnnnnnnnnnnnnnnnnnnnnnnnnnnnnnnnnnnnnnnnnnnnnnnnnnnnnnnnnnnnnnnnnnnnnnnnnnnnnnnnnnnnnnnnnnnnnnnnnnnnnnnnnnnnnnnnnnnnnnnnnnnnnnnnnnnnnnnnnnnnnnnnnnnnnnnnnnnnnnnnnnnnnnnnnnnnnnnnnnnnnnnnnnnnnnnnnnnnnnnnnnnnnnnnnnnnnnnnnnnnnnnnnnnnnnnnnnnnnnnnnnnnnnnnnnnnnnnnnnnnnnnnnnnnnnnnnnnnnnnnnnnnnnnnnnnnnnnnnnnnnnnnnnnnnnnnnnnnnnnnnnnnnnnnnnnnnnnnnnnnnnnnnnnnnnnnnnnnnnnnnnnnnnnnnnnnnnnnnnnnnnnnnnnnnnnnnnnnnnnnnnnnnnnnnnnnnnnnnnnnnnnnnnnnnnnnnnnnnnnnnnnnnnnnnnnnnnnnnnnnnnnnnnnnnnnnnnnnnnnnnnnnnnnnnnnnnnnnnnnnnnnnnnnnnnnnnnnnnnnnnnnnnnnnnnnnnnnnnnnnnnnnnnnnnnnnnnnnnnnnnnnnnnnnnnnnnnnnnnnnnnnnnnnnnnnnnnnnnnnnnnnnnnnnnnnnnnnnnnnnnnnnnnnnnnnnnnnnnnnnnnnnnnnnnnnnnnnnnnnnnnnnnnnnnnnnnnnnnnnnnnnnnnnnnnnnnnnnnnnnnnnnnnnnnnnnnnnnnnnnnnnnnnnnnnnnnnnnnnnnnnnnnnnnnnnnnnnnnnnnnnnnnnnnnnnnnnnnnnnnnnnnnnnnnnnnnnnnnnnnnnnnnnnnnnnnnnnnnnnnnnnnnnnnnnnnnnnnnnnnnnnnnnnnnnnnnnnnnnnnnnnnnnnnnnnnnnnnnnnnnnnnnnnnnnnnnnnnnnnnnnnnnnnnnnnnnnnnnnnnnnnnnnnnnnnnnnnnnnnnnnnnnnnnnnnnnnnnnnnnnnnnnnnnnnnnnnnnnnnnnnnnnnnnnnnnnnnnnnnnnnnnnnnnnnnnnnnnnnnnnnnnnnnnnnnnnnnnnnnnnnnnnnnnnnnnnnnnnnnnnnnnnnnnnnnnnnnnnnnnnnnnnnnnnnnnnnnnnnnnnnnnnnnnnnnnnnnnnnnnnnnnnnnnnnnnnnnnnnnnnnnnnnnnnnnnnnnnnnnnnnnnnnnnnnnnnnnnnnnnnnnnnnnnnnnnnnnnnnnnnnnnnnnnnnnnnnnnnnnnnnnnnnnnnnnnnnnnnnnnnnnnnnnnnnnnnnnnnnnnnnnnnnnnnnnnnnnnnnnnnnnnnnnnnnnnnnnnnnnnnnnnnnnnnnnnnnnnnnnnnnnnnnnnnnnnnnnnnnnnnnnnnnnnnnnnnnnnnnnnnnnnnnnnnnnnnnnnnnnnnnnnnnnnnnnnnnnnnnnnnnnnnnnnnnnnnnnnnnnnnnnnnnnnnnnnnnnnnnnnnnnnnnnnnnnnnnnnnnnnnnnnnnnnnnnnnnnnnnnnnnnnnnnnnnnnnnnnnnnnnnnnnnnnnnnnnnnnnnnnnnnnnnnnnnnnnnnnnnnnnnnnnnnnnnnnnnnnnnnnnnnnnnnnnnnnnnnnnnnnnnnnnnnnnnnnnnnnnnnnnnnnnnnnnnnnnnnnnnnnnnnnnnnnnnnnnnnnnnnnnnnnnnnnnnnnnnnnnnnnnnnnnnnnnnnnnnnnnnnnnnnnnnnnnnnnnnnnnnnnnnnnnnnnnnnnnnnnnnnnnnnnnnnnnnnnnnnnnnnnnnnnnnnnnnnnnnnnnnnnnnnnnnnnnnnnnnnnnnnnnnnnnnnnnnnnnnnnnnnnnnnnnnnnnnnnnnnnnnnnnnnnnnnnnnnnnnnnnnnnnnnnnnnnnnnnnnnnnnnnnnnnnnnnnnnnnnnnnnnnnnnnnnnnnnnnnnnnnnnnnnnnnnnnnnnnnnnnnnnnnnnnnnnnnnnnnnnnnnnnnnnnnnnnnnnnnnnnnnnnnnnnnnnnnnnnnnnnnnnnnnnnnnnnnnnnnnnnnnnnnnnnnnnnnnnnnnnnnnnnnnnnnnnnnnnnnnnnnnnnnnnnnnnnnnnnnnnnnnnnnnnnnnnnnnnnnnnnnnnnnnnnnnnnnnnnnnnnnnnnnnnnnnnnnnnnnnnnnnnnnnnnnnnnnnnnnnnnnnnnnnnnnnnnnnnnnnnnnnnnnnnnnnnnnnnnnnnnnnnnnnnnnnnnnnnnnnnnnnnnnnnnnnnnnnnnnnnnnnnnnnnnnnnnnnnnnnnnnnnnnnnnnnnnnnnnnnnnnnnnnnnnnnnnnnnnnnnnnnnnnnnnnnnnnnnnnnnnnnnnnnnnnnnnnnnnnnnnnnnnnnnnnnnnnnnnnnnnnnnnnnnnnnnnnnnnnnnnnnnnnnnnnnnnnnnnnnnnnnnnnnnnnnnnnnnnnnnnnnnnnnnnnnnnnnnnnnnnnnnnnnnnnnnnnnnnnnnnnnnnnnnnnnnnnnnnnnnnnnnnnnnnnnnnnnnnnnnnnnnnnnnnnnnnnnnnnnnnnnnnnnnnnnnnnnnnnnnnnnnnnnnnnnnnnnnnnnnnnnnnnnnnnnnnnnnnnnnnnnnnnnnnnnnnnnnnnnnnnnnnnnnnnnnnnnnnnnnnnnnnnnnnnnnnnnnnnnnnnnnnnnnnnnnnnnnnnnnnnnnnnnnnnnnnnnnnnnnnnnnnnnnnnnnnnnnnnnnnnnnnnnnnnnnnnnnnnnnnnnnnnnnnnnnnnnnnnnnnnnnnnnnnnnnnnnnnnnnnnnnnnnnnnnnnnnnnnnnnnnnnnnnnnnnnnnnnnnnnnnnnnnnnnnnnnnnnnnnnnnnnnnnnnnnnnnnnnnnnnnnnnnnnnnnnnnnnnnnnnnnnnnnnnnnnnnnnnnnnnnnnnnnnnnnnnnnnnnnnnnnnnnnnnnnnnnnnnnnnnnnnnnnnnnnnnnnnnnnnnnnnnnnnnnnnnnnnnnnnnnnnnnnnnnnnnnnnnnnnnnnnnnnnnnnnnnnnnnnnnnnnnnnnnnnnnnnnnnnnnnnnnnnnnnnnnnnnnnnnnnnnnnnnnnnnnnnnnnnnnnnnnnnnnnnnnnnnnnnnnnnnnnnnnnnnnnnnnnnnnnnnnnnnnnnnnnnnnnnnnnnnnnnnnnnnnnnnnnnnnnnnnnnnnnnnnnnnnnnnnnnnnnnnnnnnnnnnnnnnnnnnnnnnnnnnnnnnnnnnnnnnnnnnnnnnnnnnnnnnnnnnnnnnnnnnnnnnnnnnnnnnnnnnnnnnnnnnnnnnnnnnnnnnnnnnnnnnnnnnnnnnnnnnnnnnnnnnnnnnnnnnnnnnnnnnnnnnnnnnnnnnnnnnnnnnnnnnnnnnnnnnnnnnnnnnnnnnnnnnnnnnnnnnnnnnnnnnnnnnnnnnnnnnnnnnnnnnnnnnnnnnnnnnnnnnnnnnnnnnnnnnnnnnnnnnnnnnnnnnnnnnnnnnnnnnnnnnnnnnnnnnnnnnnnnnnnnnnnnnnnnnnnnnnnnnnnnnnnnnnnnnnnnnnnnnnnnnnnnnnnnnnnnnnnnnnnnnnnnnnnnnnnnnnnnnnnnnnnnnnnnnnnnnnnnnnnnnnnnnnnnnnnnnnnnnnnnnnnnnnnnnnnnnnnnnnnnnnnnnnnnnnnnnnnnnnnnnnnnnnnnnnnnnnnnnnnnnnnnnnnnnnnnnnnnnnnnnnnnnnnnnnnnnnnnnnnnnnnnnnnnnnnnnnnnnnnnnnnnnnnnnnnnnnnnnnnnnnnnnnnnnnnnnnnnnnnnnnnnnnnnnnnnnnnnnnnnnnnnnnnnnnnnnnnnnnnnnnnnnnnnnnnnnnnnnnnnnnnnnnnnnnnnnnnnnnnnnnnnnnnnnnnnnnnnnnnnnnnnnnnnnnnnnnnnnnnnnnnnnnnnnnnnnnnnnnnnnnnnnnnnnnnnnnnnnnnnnnnnnnnnnnnnnnnnnnnnnnnnnnnnnnnnnnnnnnnnnnnnnnnnnnnnnnnnnnnnnnnnnnnnnnnnnnnnnnnnnnnnnnnnnnnnnnnnnnnnnnnnnnnnnnnnnnnnnnnnnnnnnnnnnnnnnnnnnnnnnnnnnnnnnnnnnnnnnnnnnnnnnnnnnnnnnnnnnnnnnnnnnnnnnnnnnnnnnnnnnnnnnnnnnnnnnnnnnnnnnnnnnnnnnnnnnnnnnnnnnnnnnnnnnnnnnnnnnnnnnnnnnnnnnnnnnnnnnnnnnnnnnnnnnnnnnnnnnnnnnnnnnnnnnnnnnnnnnnnnnnnnnnnnnnnnnnnnnnnnnnnnnnnnnnnnnnnnnnnnnnnnnnnnnnnnnnnnnnnnnnnnnnnnnnnnnnnnnnnnnnnnnnnnnnnnnnnnnnnnnnnnnnnnnnnnnnnnnnnnnnnnnnnnnnnnnnnnnnnnnnnnnnnnnnnnnnnnnnnnnnnnnnnnnnnnnnnnnnnnnnnnnnnnnnnnnnnnnnnnnnnnnnnnnnnnnnnnnnnnnnnnnnnnnnnnnnnnnnnnnnnnnnnnnnnnnnnnnnnnnnnnnnnnnnnnnnnnnnnnnnnnnnnnnnnnnnnnnnnnnnnnnnnnnnnnnnnnnnnnnnnnnnnnnnnnnnnnnnnnnnnnnnnnnnnnnnnnnnnnnnnnnnnnnnnnnnnnnnnnnnnnnnnnnnnnnnnnnnnnnnnnnnnnnnnnnnnnnnnnnnnnnnnnnnnnnnnnnnnnnnnnnnnnnnnnnnnnnnnnnnnnnnnnnnnnnnnnnnnnnnnnnnnnnnnnnnnnnnnnnnnnnnnnnnnnnnnnnnnnnnnnnnnnnnnnnnnnnnnnnnnnnnnnnnnnnnnnnnnnnnnnnnnnnnnnnnnnnnnnnnnnnnnnnnnnnnnnnnnnnnnnnnnnnnnnnnnnnnnnnnnnnnnnnnnnnnnnnnnnnnnnnnnnnnnnnnnnnnnnnnnnnnnnnnnnnnnnnnnnnnnnnnnnnnnnnnnnnnnnnnnnnnnnnnnnnnnnnnnnnnnnnnnnnnnnnnnnnnnnnnnnnnnnnnnnnnnnnnnnnnnnnnnnnnnnnnnnnnnnnnnnnnnnnnnnnnnnnnnnnnnnnnnnnnnnnnnnnnnnnnnnnnnnnnnnnnnnnnnnnnnnnnnnnnnnnnnnnnnnnnnnnnnnnnnnnnnnnnnnnnnnnnnnnnnnnnnnnnnnnnnnnnnnnnnnnnnnnnnnnnnnnnnnnnnnnnnnnnnnnnnnnnnnnnnnnnnnnnnnnnnnnnnnnnnnnnnnnnnnnnnnnnnnnnnnnnnnnnnnnnnnnnnnnnnnnnnnnnnnnnnnnnnnnnnnnnnnnnnnnnnnnnnnnnnnnnnnnnnnnnnnnnnnnnnnnnnnnnnnnnnnnnnnnnnnnnnnnnnnnnnnnnnnnnnnnnnnnnnnnnnnnnnnnnnnnnnnnnnnnnnnnnnnnnnnnnnnnnnnnnnnnnnnnnnnnnnnnnnnnnnnnnnnnnnnnnnnnnnnnnnnnnnnnnnnnnnnnnnnnnnnnnnnnnnnnnnnnnnnnnnnnnnnnnnnnnnnnnnnnnnnnnnnnnnnnnnnnnnnnnnnnnnnnnnnnnnnnnnnnnnnnnnnnnnnnnnnnnnnnnnnnnnnnnnnnnnnnnnnnnnnnnnnnnnnnnnnnnnnnnnnnnnnnnnnnnnnnnnnnnnnnnnnnnnnnnnnnnnnnnnnnnnnnnnnnnnnnnnnnnnnnnnnnnnnnnnnnnnnnnnnnnnnnnnnnnnnnnnnnnnnnnnnnnnnnnnnnnnnnnnnnnnnnnnnnnnnnnnnnnnnnnnnnnnnnnnnnnnnnnnnnnnnnnnnnnnnnnnnnnnnnnnnnnnnnnnnnnnnnnnnnnnnnnnnnnnnnnnnnnnnnnnnnnnnnnnnnnnnnnnnnnnnnnnnnnnnnnnnnnnnnnnnnnnnnnnnnnnnnnnnnnnnnnnnnnnnnnnnnnnnnnnnnnnnnnnnnnnnnnnnnnnnnnnnnnnnnnnnnnnnnnnnnnnnnnnnnnnnnnnnnnnnnnnnnnnnnnnnnnnnnnnnnnnnnnnnnnnnnnnnnnnnnnnnnnnnnnnnnnnnnnnnnnnnnnnnnnnnnnnnnnnnnnnnnnnnnnnnnnnnnnnnnnnnnnnnnnnnnnnnnnnnnnnnnnnnnnnnnnnnnnnnnnnnnnnnnnnnnnnnnnnnnnnnnnnnnnnnnnnnnnnnnnnnnnnnnnnnnnnnnnnnnnnnnnnnnnnnnnnnnnnnnnnnnnnnnnnnnnnnnnnnnnnnnnnnnnnnnnnnnnnnnnnnnnnnnnnnnnnnnnnnnnnnnnnnnnnnnnnnnnnnnnnnnnnnnnnnnnnnnnnnnnnnnnnnnnnnnnnnnnnnnnnnnnnnnnnnnnnnnnnnnnnnnnnnnnnnnnnnnnnnnnnnnnnnnnnnnnnnnnnnnnnnnnnnnnnnnnnnnnnnnnnnnnnnnnnnnnnnnnnnnnnnnnnnnnnnnnnnnnnnnnnnnnnnnnnnnnnnnnnnnnnnnnnnnnnnnnnnnnnnnnnnnnnnnnnnnnnnnnnnnnnnnnnnnnnnnnnnnnnnnnnnnnnnnnnnnnnnnnnnnnnnnnnnnnnnnnnnnnnnnnnnnnnnnnnnnnnnnnnnnnnnnnnnnnnnnnnnnnnnnnnnnnnnnnnnnnnnnnnnnnnnnnnnnnnnnnnnnnnnnnnnnnnnnnnnnnnnnnnnnnnnnnnnnnnnnnnnnnnnnnnnnnnnnnnnnnnnnnnnnnnnnnnnnnnnnnnnnnnnnnnnnnnnnnnnnnnnnnnnnnnnnnnnnnnnnnnnnnnnnnnnnnnnnnnnnnnnnnnnnnnnnnnnnnnnnnnnnnnnnnnnnnnnnnnnnnnnnnnnnnnnnnnnnnnnnnnnnnnnnnnnnnnnnnnnnnnnnnnnnnnnnnnnnnnnnnnnnnnnnnnnnnnnnnnnnnnnnnnnnnnnnnnnnnnnnnnnnnnnnnnnnnnnnnnnnnnnnnnnnnnnnnnnnnnnnnnnnnnnnnnnnnnnnnnnnnnnnnnnnnnnnnnnnnnnnnnnnnnnnnnnnnnnnnnnnnnnnnnnnnnnnnnnnnnnnnnnnnnnnnnnnnnnnnnnnnnnnnnnnnnnnnnnnnnnnnnnnnnnnnnnnnnnnnnnnnnnnnnnnnnnnnnnnnnnnnnnnnnnnnnnnnnnnnnnnnnnnnnnnnnnnnnnnnnnnnnnnnnnnnnnnnnnnnnnnnnnnnnnnnnnnnnnnnnnnnnnnnnnnnnnnnnnnnnnnnnnnnnnnnnnnnnnnnnnnnnnnnnnnnnnnnnnnnnnnnnnnnnnnnnnnnnnnnnnnnnnnnnnnnnnnnnnnnnnnnnnnnnnnnnnnnnnnnnnnnnnnnnnnnnnnnnnnnnnnnnnnnnnnnnnnnnnnnnnnnnnnnnnnnnnnnnnnnnnnnnnnnnnnnnnnnnnnnnnnnnnnnnnnnnnnnnnnnnnnnnnnnnnnnnnnnnnnnnnnnnnnnnnnnnnnnnnnnnnnnnnnnnnnnnnnnnnnnnnnnnnnnnnnnnnnnnnnnnnnnnnnnnnnnnnnnnnnnnnnnnnnnnnnnnnnnnnnnnnnnnnnnnnnnnnnnnnnnnnnnnnnnnnnnnnnnnnnnnnnnnnnnnnnnnnnnnnnnnnnnnnnnnnnnnnnnnnnnnnnnnnnnnnnnnnnnnnnnnnnnnnnnnnnnnnnnnnnnnnnnnnnnnnnnnnnnnnnnnnnnnnnnnnnnnnnnnnnnnnnnnnnnnnnnnnnnnnnnnnnnnnnnnnnnnnnnnnnnnnnnnnnnnnnnnnnnnnnnnnnnnnnnnnnnnnnnnnnnnnnnnnnnnnnnnnnnnnnnnnnnnnnnnnnnnnnnnnnnnnnnnnnnnnnnnnnnnnnnnnnnnnnnnnnnnnnnnnnnnnnnnnnnnnnnnnnnnnnnnnnnnnnnnnnnnnnnnnnnnnnnnnnnnnnnnnnnnnnnnnnnnnnnnnnnnnnnnnnnnnnnnnnnnnnnnnnnnnnnnnnnnnnnnnnnnnnnnnnnnnnnnnnnnnnnnnnnnnnnnnnnnnnnnnnnnnnnnnnnnnnnnnnnnnnnnnnnnnnnnnnnnnnnnnnnnnnnnnnnnnnnnnnnnnnnnnnnnnnnnnnnnnnnnnnnnnnnnnnnnnnnnnnnnnnnnnnnnnnnnnnnnnnnnnnnnnnnnnnnnnnnnnnnnnnnnnnnnnnnnnnnnnnnnnnnnnnnnnnnnnnnnnnnnnnnnnnnnnnnnnnnnnnnnnnnnnnnnnnnnnnnnnnnnnnnnnnnnnnnnnnnnnnnnnnnnnnnnnnnnnnnnnnnnnnnnnnnnnnnnnnnnnnnnnnnnnnnnnnnnnnnnnnnnnnnnnnnnnnnnnnnnnnnnnnnnnnnnnnnnnnnnnnnnnnnnnnnnnnnnnnnnnnnnnnnnnnnnnnnnnnnnnnnnnnnnnnnnnnnnnnnnnnnnnnnnnnnnnnnnnnnnnnnnnnnnnnnnnnnnnnnnnnnnnnnnnnnnnnnnnnnnnnnnnnnnnnnnnnnnnnnnnnnnnnnnnnnnnnnnnnnnnnnnnnnnnnnnnnnnnnnnnnnnnnnnnnnnnnnnnnnnnnnnnnnnnnnnnnnnnnnnnnnnnnnnnnnnnnnnnnnnnnnnnnnnnnnnnnnnnnnnnnnnnnnnnnnnnnnnnnnnnnnnnnnnnnnnnnnnnnnnnnnnnnnnnnnnnnnnnnnnnnnnnnnnnnnnnnnnnnnnnnnnnnnnnnnnnnnnnnnnnnnnnnnnnnnnnnnnnnnnnnnnnnnnnnnnnnnnnnnnnnnnnnnnnnnnnnnnnnnnnnnnnnnnnnnnnnnnnnnnnnnnnnnnnnnnnnnnnnnnnnnnnnnnnnnnnnnnnnnnnnnnnnnnnnnnnnnnnnnnnnnnnnnnnnnnnnnnnnnnnnnnnnnnnnnnnnnnnnnnnnnnnnnnnnnnnnnnnnnnnnnnnnnnnnnnnnnnnnnnnnnnnnnnnnnnnnnnnnnnnnnnnnnnnnnnnnnnnnnnnnnnnnnnnnnnnnnnnnnnnnnnnnnnnnnnnnnnnnnnnnnnnnnnnnnnnnnnnnnnnnnnnnnnnnnnnnnnnnnnnnnnnnnnnnnnnnnnnnnnnnnnnnnnnnnnnnnnnnnnnnnnnnnnnnnnnnnnnnnnnnnnnnnnnnnnnnnnnnnnnnnnnnnnnnnnnnnnnnnnnnnnnnnnnnnnnnnnnnnnnnnnnnnnnnnnnnnnnnnnnnnnnnnnnnnnnnnnnnnnnnnnnnnnnnnnnnnnnnnnnnnnnnnnnnnnnnnnnnnnnnnnnnnnnnnnnnnnnnnnnnnnnnnnnnnnnnnnnnnnnnnnnnnnnnnnnnnnnnnnnnnnnnnnnnnnnnnnnnnnnnnnnnnnnnnnnnnnnnnnnnnnnnnnnnnnnnnnnnnnnnnnnnnnnnnnnnnnnnnnnnnnnnnnnnnnnnnnnnnnnnnnnnnnnnnnnnnnnnnnnnnnnnnnnnnnnnnnnnnnnnnnnnnnnnnnnnnnnnnnnnnnnnnnnnnnnnnnnnnnnnnnnnnnnnnnnnnnnnnnnnnnnnnnnnnnnnnnnnnnnnnnnnnnnnnnnnnnnnnnnnnnnnnnnnnnnnnnnnnnnnnnnnnnnnnnnnnnnnnnnnnnnnnnnnnnnnnnnnnnnnnnnnnnnnnnnnnnnnnnnnnnnnnnnnnnnnnnnnnnnnnnnnnnnnnnnnnnnnnnnnnnnnnnnnnnnnnnnnnnnnnnnnnnnnnnnnnnnnnnnnnnnnnnnnnnnnnnnnnnnnnnnnnnnnnnnnnnnnnnnnnnnnnnnnnnnnnnnnnnnnnnnnnnnnnnnnnnnnnnnnnnnnnnnnnnnnnnnnnnnnnnnnnnnnnnnnnnnnnnnnnnnnnnnnnnnnnnnnnnnnnnnnnnnnnnnnnnnnnnnnnnnnnnnnnnnnnnnnnnnnnnnnnnnnnnnnnnnnnnnnnnnnnnnnnnnnnnnnnnnnnnnnnnnnnnnnnnnnnnnnnnnnnnnnnnnnnnnnnnnnnnnnnnnnnnnnnnnnnnnnnnnnnnnnnnnnnnnnnnnnnnnnnnnnnnnnnnnnnnnnnnnnnnnnnnnnnnnnnnnnnnnnnnnnnnnnnnnnnnnnnnnnnnnnnnnnnnnnnnnnnnnnnnnnnnnnnnnnnnnnnnnnnnnnnnnnnnnnnnnnnnnnnnnnnnnnnnnnnnnnnnnnnnnnnnnnnnnnnnnnnnnnnnnnnnnnnnnnnnnnnnnnnnnnnnnnnnnnnnnnnnnnnnnnnnnnnnnnnnnnnnnnnnnnnnnnnnnnnnnnnnnnnnnnnnnnnnnnnnnnnnnnnnnnnnnnnnnnnnnnnnnnnnnnnnnnnnnnnnnnnnnnnnnnnnnnnnnnnnnnnnnnnnnnnnnnnnnnnnnnnnnnnnnnnnnnnnnnnnnnnnnnnnnnnnnnnnnnnnnnnnnnnnnnnnnnnnnnnnnnnnnnnnnnnnnnnnnnnnnnnnnnnnnnnnnnnnnnnnnnnnnnnnnnnnnnnnnnnnnnnnnnnnnnnnnnnnnnnnnnnnnnnnnnnnnnnnnnnnnnnnnnnnnnnnnnnnnnnnnnnnnnnnnnnnnnnnnnnnnnnnnnnnnnnnnnnnnnnnnnnnnnnnnnnnnnnnnnnnnnnnnnnnnnnnnnnnnnnnnnnnnnnnnnnnnnnnnnnnnnnnnnnnnnnnnnnnnnnnnnnnnnnnnnnnnnnnnnnnnnnnnnnnnnnnnnnnnnnnnnnnnnnnnnnnnnnnnnnnnnnnnnnnnnnnnnnnnnnnnnnnnnnnnnnnnnnnnnnnnnnnnnnnnnnnnnnnnnnnnnnnnnnnnnnnnnnnnnnnnnnnnnnnnnnnnnnnnnnnnnnnnnnnnnnnnnnnnnnnnnnnnnnnnnnnnnnnnnnnnnnnnnnnnnnnnnnnnnnnnnnnnnnnnnnnnnnnnnnnnnnnnnnnnnnnnnnnnnnnnnnnnnnnnnnnnnnnnnnnnnnnnnnnnnnnnnnnnnnnnnnnnnnnnnnnnnnnnnnnnnnnnnnnnnnnnnnnnnnnnnnnnnnnnnnnnnnnnnnnnnnnnnnnnnnnnnnnnnnnnnnnnnnnnnnnnnnnnnnnnnnnnnnnnnnnnnnnnnnnnnnnnnnnnnnnnnnnnnnnnnnnnnnnnnnnnnnnnnnnnnnnnnnnnnnnnnnnnnnnnnnnnnnnnnnnnnnnnnnnnnnnnnnnnnnnnnnnnnnnnnnnnnnnnnnnnnnnnnnnnnnnnnnnnnnnnnnnnnnnnnnnnnnnnnnnnnnnnnnnnnnnnnnnnnnnnnnnnnnnnnnnnnnnnnnnnnnnnnnnnnnnnnnnnnnnnnnnnnnnnnnnnnnnnnnnnnnnnnnnnnnnnnnnnnnnnnnnnnnnnnnnnnnnnnnnnnnnnnnnnnnnnnnnnnnnnnnnnnnnnnnnnnnnnnnnnnnnnnnnnnnnnnnnnnnnnnnnnnnnnnnnnnnnnnnnnnnnnnnnnnnnnnnnnnnnnnnnnnnnnnnnnnnnnnnnnnnnnnnnnnnnnnnnnnnnnnnnnnnnnnnnnnnnnnnnnnnnnnnnnnnnnnnnnnnnnnnnnnnnnnnnnnnnnnnnnnnnnnnnnnnnnnnnnnnnnnnnnnnnnnnnnnnnnnnnnnnnnnnnnnnnnnnnnnnnnnnnnnnnnnnnnnnnnnnnnnnnnnnnnnnnnnnnnnnnnnnnnnnnnnnnnnnnnnnnnnnnnnnnnnnnnnnnnnnnnnnnnnnnnnnnnnnnnnnnnnnnnnnnnnnnnnnnnnnnnnnnnnnnnnnnnnnnnnnnnnnnnnnnnnnnnnnnnnnnnnnnnnnnnnnnnnnnnnnnnnnnnnnnnnnnnnnnnnnnnnnnnnnnnnnnnnnnnnnnnnnnnnnnnnnnnnnnnnnnnnnnnnnnnnnnnnnnnnnnnnnnnnnnnnnnnnnnnnnnnnnnnnnnnnnnnnnnnnnnnnnnnnnnnnnnnnnnnnnnnnnnnnnnnnnnnnnnnnnnnnnnnnnnnnnnnnnnnnnnnnnnnnnnnnnnnnnnnnnnnnnnnnnnnnnnnnnnnnnnnnnnnnnnnnnnnnnnnnnnnnnnnnnnnnnnnnnnnnnnnnnnnnnnnnnnnnnnnnnnnnnnnnnnnnnnnnnnnnnnnnnnnnnnnnnnnnnnnnnnnnnnnnnnnnnnnnnnnnnnnnnnnnnnnnnnnnnnnnnnnnnnnnnnnnnnnnnnnnnnnnnnnnnnnnnnnnnnnnnnnnnnnnnnnnnnnnnnnnnnnnnnnnnnnnnnnnnnnnnnnnnnnnnnnnnnnnnnnnnnnnnnnnnnnnnnnnnnnnnnnnnnnnnnnnnnnnnnnnnnnnnnnnnnnnnnnnnnnnnnnnnnnnnnnnnnnnnnnnnnnnnnnnnnnnnnnnnnnnnnnnnnnnnnnnnnnnnnnnnnnnnnnnnnnnnnnnnnnnnnnnnnnnnnnnnnnnnnnnnnnnnnnnnnnnnnnnnnnnnnnnnnnnnnnnnnnnnnnnnnnnnnnnnnnnnnnnnnnnnnnnnnnnnnnnnnnnnnnnnnnnnnnnnnnnnnnnnnnnnnnnnnnnnnnnnnnnnnnnnnnnnnnnnnnnnnnnnnnnnnnnnnnnnnnnnnnnnnnnnnnnnnnnnnnnnnnnnnnnnnnnnnnnnnnnnnnnnnnnnnnnnnnnnnnnnnnnnnnnnnnnnnnnnnnnnnnnnnnnnnnnnnnnnnnnnnnnnnnnnnnnnnnnnnnnnnnnnnnnnnnnnnnnnnnnnnnnnnnnnnnnnnnnnnnnnnnnnnnnnnnnnnnnnnnnnnnnnnnnnnnnnnnnnnnnnnnnnnnnnnnnnnnnnnnnnnnnnnnnnnnnnnnnnnnnnnnnnnnnnnnnnnnnnnnnnnnnnnnnnnnnnnnnnnnnnnnnnnnnnnnnnnnnnnnnnnnnnnnnnnnnnnnnnnnnnnnnnnnnnnnnnnnnnnnnnnnnnnnnnnnnnnnnnnnnnnnnnnnnnnnnnnnnnnnnnnnnnnnnnnnnnnnnnnnnnnnnnnnnnnnnnnnnnnnnnnnnnnnnnnnnnnnnnnnnnnnnnnnnnnnnnnnnnnnnnnnnnnnnnnnnnnnnnnnnnnnnnnnnnnnnnnnnnnnnnnnnnnnnnnnnnnnnnnnnnnnnnnnnnnnnnnnnnnnnnnnnnnnnnnnnnnnnnnnnnnnnnnnnnnnnnnnnnnnnnnnnnnnnnnnnnnnnnnnnnnnnnnnnnnnnnnnnnnnnnnnnnnnnnnnnnnnnnnnnnnnnnnnnnnnnnnnnnnnnnnnnnnnnnnnnnnnnnnnnnnnnnnnnnnnnnnnnnnnnnnnnnnnnnnnnnnnnnnnnnnnnnnnnnnnnnnnnnnnnnnnnnnnnnnnnnnnnnnnnnnnnnnnnnnnnnnnnnnnnnnnnnnnnnnnnnnnnnnnnnnnnnnnnnnnnnnnnnnnnnnnnnnnnnnnnnnnnnnnnnnnnnnnnnnnnnnnnnnnnnnnnnnnnnnnnnnnnnnnnnnnnnnnnnnnnnnnnnnnnnnnnnnnnnnnnnnnnnnnnnnnnnnnnnnnnnnnnnnnnnnnnnnnnnnnnnnnnnnnnnnnnnnnnnnnnnnnnnnnnnnnnnnnnnnnnnnnnnnnnnnnnnnnnnnnnnnnnnnnnnnnnnnnnnnnnnnnnnnnnnnnnnnnnnnnnnnnnnnnnnnnnnnnnnnnnnnnnnnnnnnnnnnnnnnnnnnnnnnnnnnnnnnnnnnnnnnnnnnnnnnnnnnnnnnnnnnnnnnnnnnnnnnnnnnnnnnnnnnnnnnnnnnnnnnnnnnnnnnnnnnnnnnnnnnnnnnnnnnnnnnnnnnnnnnnnnnnnnnnnnnnnnnnnnnnnnnnnnnnnnnnnnnnnnnnnnnnnnnnnnnnnnnnnnnnnnnnnnnnnnnnnnnnnnnnnnnnnnnnnnnnnnnnnnnnnnnnnnnnnnnnnnnnnnnnnnnnnnnnnnnnnnnnnnnnnnnnnnnnnnnnnnnnnnnnnnnnnnnnnnnnnnnnnnnnnnnnnnnnnnnnnnnnnnnnnnnnnnnnnnnnnnnnnnnnnnnnnnnnnnnnnnnnnnnnnnnnnnnnnnnnnnnnnnnnnnnnnnnnnnnnnnnnnnnnnnnnnnnnnnnnnnnnnnnnnnnnnnnnnnnnnnnnnnnnnnnnnnnnnnnnnnnnnnnnnnnnnnnnnnnnnnnnnnnnnnnnnnnnnnnnnnnnnnnnnnnnnnnnnnnnnnnnnnnnnnnnnnnnnnnnnnnnnnnnnnnnnnnnnnnnnnnnnnnnnnnnnnnnnnnnnnnnnnnnnnnnnnnnnnnnnnnnnnnnnnnnnnnnnnnnnnnnnnnnnnnnnnnnnnnnnnnnnnnnnnnnnnnnnnnnnnnnnnnnnnnnnnnnnnnnnnnnnnnnnnnnnnnnnnnnnnnnnnnnnnnnnnnnnnnnnnnnnnnnnnnnnnnnnnnnnnnnnnnnnnnnnnnnnnnnnnnnnnnnnnnnnnnnnnnnnnnnnnnnnnnnnnnnnnnnnnnnnnnnnnnnnnnnnnnnnnnnnnnnnnnnnnnnnnnnnnnnnnnnnnnnnnnnnnnnnnnnnnnnnnnnnnnnnnnnnnnnnnnnnnnnnnnnnnnnnnnnnnnnnnnnnnnnnnnnnnnnnnnnnnnnnnnnnnnnnnnnnnnnnnnnnnnnnnnnnnnnnnnnnnnnnnnnnnnnnnnnnnnnnnnnnnnnnnnnnnnnnnnnnnnnnnnnnnnnnnnnnnnnnnnnnnnnnnnnnnnnnnnnnnnnnnnnnnnnnnnnnnnnnnnnnnnnnnnnnnnnnnnnnnnnnnnnnnnnnnnnnnnnnnnnnnnnnnnnnnnnnnnnnnnnnnnnnnnnnnnnnnnnnnnnnnnnnnnnnnnnnnnnnnnnnnnnnnnnnnnnnnnnnnnnnnnnnnnnnnnnnnnnnnnnnnnnnnnnnnnnnnnnnnnnnnnnnnnnnnnnnnnnnnnnnnnnnnnnnnnnnnnnnnnnnnnnnnnnnnnnnnnnnnnnnnnnnnnnnnnnnnnnnnnnnnnnnnnnnnnnnnnnnnnnnnnnnnnnnnnnnnnnnnnnnnnnnnnnnnnnnnnnnnnnnnnnnnnnnnnnnnnnnnnnnnnnnnnnnnnnnnnnnnnnnnnnnnnnnnnnnnnnnnnnnnnnnnnnnnnnnnnnnnnnnnnnnnnnnnnnnnnnnnnnnnnnnnnnnnnnnnnnnnnnnnnnnnnnnnnnnnnnnnnnnnnnnnnnnnnnnnnnnnnnnnnnnnnnnnnnnnnnnnnnnnnnnnnnnnnnnnnnnnnnnnnnnnnnnnnnnnnnnnnnnnnnnnnnnnnnnnnnnnnnnnnnnnnnnnnnnnnnnnnnnnnnnnnnnnnnnnnnnnnnnnnnnnnnnnnnnnnnnnnnnnnnnnnnnnnnnnnnnnnnnnnnnnnnnnnnnnnnnnnnnnnnnnnnnnnnnnnnnnnnnnnnnnnnnnnnnnnnnnnnnnnnnnnnnnnnnnnnnnnnnnnnnnnnnnnnnnnnnnnnnnnnnnnnnnnnnnnnnnnnnnnnnnnnnnnnnnnnnnnnnnnnnnnnnnnnnnnnnnnnnnnnnnnnnnnnnnnnnnnnnnnnnnnnnnnnnnnnnnnnnnnnnnnnnnnnnnnnnnnnnnnnnnnnnnnnnnnnnnnnnnnnnnnnnnnnnnnnnnnnnnnnnnnnnnnnnnnnnnnnnnnnnnnnnnnnnnnnnnnnnnnnnnnnnnnnnnnnnnnnnnnnnnnnnnnnnnnnnnnnnnnnnnnnnnnnnnnnnnnnnnnnnnnnnnnnnnnnnnnnnnnnnnnnnnnnnnnnnnnnnnnnnnnnnnnnnnnnnnnnnnnnnnnnnnnnnnnnnnnnnnnnnnnnnnnnnnnnnnnnnnnnnnnnnnnnnnnnnnnnnnnnnnnnnnnnnnnnnnnnnnnnnnnnnnnnnnnnnnnnnnnnnnnnnnnnnnnnnnnnnnnnnnnnnnnnnnnnnnnnnnnnnnnnnnnnnnnnnnnnnnnnnnnnnnnnnnnnnnnnnnnnnnnnnnnnnnnnnnnnnnnnnnnnnnnnnnnnnnnnnnnnnnnnnnnnnnnnnnnnnnnnnnnnnnnnnnnnnnnnnnnnnnnnnnnnnnnnnnnnnnnnnnnnnnnnnnnnnnnnnnnnnnnnnnnnnnnnnnnnnnnnnnnnnnnnnnnnnnnnnnnnnnnnnnnnnnnnnnnnnnnnnnnnnnnnnnnnnnnnnnnnnnnnnnnnnnnnnnnnnnnnnnnnnnnnnnnnnnnnnnnnnnnnnnnnnnnnnnnnnnnnnnnnnnnnnnnnnnnnnnnnnnnnnnnnnnnnnnnnnnnnnnnnnnnnnnnnnnnnnnnnnnnnnnnnnnnnnnnnnnnnnnnnnnnnnnnnnnnnnnnnnnnnnnnnnnnnnnnnnnnnnnnnnnnnnnnnnnnnnnnnnnnnnnnnnnnnnnnnnnnnnnnnnnnnnnnnnnnnnnnnnnnnnnnnnnnnnnnnnnnnnnnnnnnnnnnnnnnnnnnnnnnnnnnnnnnnnnnnnnnnnnnnnnnnnnnnnnnnnnnnnnnnnnnnnnnnnnnnnnnnnnnnnnnnnnnnnnnnnnnnnnnnnnnnnnnnnnnnnnnnnnnnnnnnnnnnnnnnnnnnnnnnnnnnnnnnnnnnnnnnnnnnnnnnnnnnnnnnnnnnnnnnnnnnnnnnnnnnnnnnnnnnnnnnnnnnnnnnnnnnnnnnnnnnnnnnnnnnnnnnnnnnnnnnnnnnnnnnnnnnnnnnnnnnnnnnnnnnnnnnnnnnnnnnnnnnnnnnnnnnnnnnnnnnnnnnnnnnnnnnnnnnnnnnnnnnnnnnnnnnnnnnnnnnnnnnnnnnnnnnnnnnnnnnnnnnnnnnnnnnnnnnnnnnnnnnnnnnnnnnnnnnnnnnnnnnnnnnnnnnnnnnnnnnnnnnnnnnnnnnnnnnnnnnnnnnnnnnnnnnnnnnnnnnnnnnnnnnnnnnnnnnnnnnnnnnnnnnnnnnnnnnnnnnnnnnnnnnnnnnnnnnnnnnnnnnnnnnnnnnnnnnnnnnnnnnnnnnnnnnnnnnnnnnnnnnnnnnnnnnnnnnnnnnnnnnnnnnnnnnnnnnnnnnnnnnnnnnnnnnnnnnnnnnnnnnnnnnnnnnnnnnnnnnnnnnnnnnnnnnnnnnnnnnnnnnnnnnnnnnnnnnnnnnnnnnnnnnnnnnnnnnnnnnnnnnnnnnnnnnnnnnnnnnnnnnnnnnnnnnnnnnnnnnnnnnnnnnnnnnnnnnnnnnnnnnnnnnnnnnnnnnnnnnnnnnnnnnnnnnnnnnnnnnnnnnnnnnnnnnnnnnnnnnnnnnnnnnnnnnnnnnnnnnnnnnnnnnnnnnnnnnnnnnnnnnnnnnnnnnnnnnnnnnnnnnnnnnnnnnnnnnnnnnnnnnnnnnnnnnnnnnnnnnnnnnnnnnnnnnnnnnnnnnnnnnnnnnnnnnnnnnnnnnnnnnnnnnnnnnnnnnnnnnnnnnnnnnnnnnnnnnnnnnnnnnnnnnnnnnnnnnnnnnnnnnnnnnnnnnnnnnnnnnnnnnnnnnnnnnnnnnnnnnnnnnnnnnnnnnnnnnnnnnnnnnnnnnnnnnnnnnnnnnnnnnnnnnnnnnnnnnnnnnnnnnnnnnnnnnnnnnnnnnnnnnnnnnnnnnnnnnnnnnnnnnnnnnnnnnnnnnnnnnnnnnnnnnnnnnnnnnnnnnnnnnnnnnnnnnnnnnnnnnnnnnnnnnnnnnnnnnnnnnnnnnnnnnnnnnnnnnnnnnnnnnnnnnnnnnnnnnnnnnnnnnnnnnnnnnnnnnnnnnnnnnnnnnnnnnnnnnnnnnnnnnnnnnnnnnnnnnnnnnnnnnnnnnnnnnnnnnnnnnnnnnnnnnnnnnnnnnnnnnnnnnnnnnnnnnnnnnnnnnnnnnnnnnnnnnnnnnnnnnnnnnnnnnnnnnnnnnnnnnnnnnnnnnnnnnnnnnnnnnnnnnnnnnnnnnnnnnnnnnnnnnnnnnnnnnnnnnnnnnnnnnnnnnnnnnnnnnnnnnnnnnnnnnnnnnnnnnnnnnnnnnnnnnnnnnnnnnnnnnnnnnnnnnnnnnnnnnnnnnnnnnnnnnnnnnnnnnnnnnnnnnnnnnnnnnnnnnnnnnnnnnnnnnnnnnnnnnnnnnnnnnnnnnnnnnnnnnnnnnnnnnnnnnnnnnnnnnnnnnnnnnnnnnnnnnnnnnnnnnnnnnnnnnnnnnnnnnnnnnnnnnnnnnnnnnnnnnnnnnnnnnnnnnnnnnnnnnnnnnnnnnnnnnnnnnnnnnnnnnnnnnnnnnnnnnnnnnnnnnnnnnnnnnnnnnnnnnnnnnnnnnnnnnnnnnnnnnnnnnnnnnnnnnnnnnnnnnnnnnnnnnnnnnnnnnnnnnnnnnnnnnnnnnnnnnnnnnnnnnnnnnnnnnnnnnnnnnnnnnnnnnnnnnnnnnnnnnnnnnnnnnnnnnnnnnnnnnnnnnnnnnnnnnnnnnnnnnnnnnnnnnnnnnnnnnnnnnnnnnnnnnnnnnnnnnnnnnnnnnnnnnnnnnnnnnnnnnnnnnnnnnnnnnnnnnnnnnnnnnnnnnnnnnnnnnnnnnnnnnnnnnnnnnnnnnnnnnnnnnnnnnnnnnnnnnnnnnnnnnnnnnnnnnnnnnnnnnnnnnnnnnnnnnnnnnnnnnnnnnnnnnnnnnnnnnnnnnnnnnnnnnnnnnnnnnnnnnnnnnnnnnnnnnnnnnnnnnnnnnnnnnnnnnnnnnnnnnnnnnnnnnnnnnnnnnnnnnnnnnnnnnnnnnnnnnnnnnnnnnnnnnnnnnnnnnnnnnnnnnnnnnnnnnnnnnnnnnnnnnnnnnnnnnnnnnnnnnnnnnnnnnnnnnnnnnnnnnnnnnnnnnnnnnnnnnnnnnnnnnnnnnnnnnnnnnnnnnnnnnnnnnnnnnnnnnnnnnnnnnnnnnnnnnnnnnnnnnnnnnnnnnnnnnnnnnnnnnnnnnnnnnnnnnnnnnnnnnnnnnnnnnnnnnnnnnnnnnnnnnnnnnnnnnnnnnnnnnnnnnnnnnnnnnnnnnnnnnnnnnnnnnnnnnnnnnnnnnnnnnnnnnnnnnnnnnnnnnnnnnnnnnnnnnnnnnnnnnnnnnnnnnnnnnnnnnnnnnnnnnnnnnnnnnnnnnnnnnnnnnnnnnnnnnnnnnnnnnnnnnnnnnnnnnnnnnnnnnnnnnnnnnnnnnnnnnnnnnnnnnnnnnnnnnnnnnnnnnnnnnnnnnnnnnnnnnnnnnnnnnnnnnnnnnnnnnnnnnnnnnnnnnnnnnnnnnnnnnnnnnnnnnnnnnnnnnnnnnnnnnnnnnnnnnnnnnnnnnnnnnnnnnnnnnnnnnnnnnnnnnnnnnnnnnnnnnnnnnnnnnnnnnnnnnnnnnnnnnnnnnnnnnnnnnnnnnnnnnnnnnnnnnnnnnnnnnnnnnnnnnnnnnnnnnnnnnnnnnnnnnnnnnnnnnnnnnnnnnnnnnnnnnnnnnnnnnnnnnnnnnnnnnnnnnnnnnnnnnnnnnnnnnnnnnnnnnnnnnnnnnnnnnnnnnnnnnnnnnnnnnnnnnnnnnnnnnnnnnnnnnnnnnnnnnnnnnnnnnnnnnnnnnnnnnnnnnnnnnnnnnnnnnnnnnnnnnnnnnnnnnnnnnnnnnnnnnnnnnnnnnnnnnnnnnnnnnnnnnnnnnnnnnnnnnnnnnnnnnnnnnnnnnnnnnnnnnnnnnnnnnnnnnnnnnnnnnnnnnnnnnnnnnnnnnnnnnnnnnnnnnnnnnnnnnnnnnnnnnnnnnnnnnnnnnnnnnnnnnnnnnnnnnnnnnnnnnnnnnnnnnnnnnnnnnnnnnnnnnnnnnnnnnnnnnnnnnnnnnnnnnnnnnnnnnnnnnnnnnnnnnnnnnnnnnnnnnnnnnnnnnnnnnnnnnnnnnnnnnnnnnnnnnnnnnnnnnnnnnnnnnnnnnnnnnnnnnnnnnnnnnnnnnnnnnnnnnnnnnnnnnnnnnnnnnnnnnnnnnnnnnnnnnnnnnnnnnnnnnnnnnnnnnnnnnnnnnnnnnnnnnnnnnnnnnnnnnnnnnnnnnnnnnnnnnnnnnnnnnnnnnnnnnnnnnnnnnnnnnnnnnnnnnnnnnnnnnnnnnnnnnnnnnnnnnnnnnnnnnnnnnnnnnnnnnnnnnnnnnnnnnnnnnnnnnnnnnnnnnnnnnnnnnnnnnnnnnnnnnnnnnnnnnnnnnnnnnnnnnnnnnnnnnnnnnnnnnnnnnnnnnnnnnnnnnnnnnnnnnnnnnnnnnnnnnnnnnnnnnnnnnnnnnnnnnnnnnnnnnnnnnnnnnnnnnnnnnnnnnnnnnnnnnnnnnnnnnnnnnnnnnnnnnnnnnnnnnnnnnnnnnnnnnnnnnnnnnnnnnnnnnnnnnnnnnnnnnnnnnnnnnnnnnnnnnnnnnnnnnnnnnnnnnnnnnnnnnnnnnnnnnnnnnnnnnnnnnnnnnnnnnnnnnnnnnnnnnnnnnnnnnnnnnnnnnnnnnnnnnnnnnnnnnnnnnnnnnnnnnnnnnnnnnnnnnnnnnnnnnnnnnnnnnnnnnnnnnnnnnnnnnnnnnnnnnnnnnnnnnnnnnnnnnnnnnnnnnnnnnnnnnnnnnnnnnnnnnnnnnnnnnnnnnnnnnnnnnnnnnnnnnnnnnnnnnnnnnnnnnnnnnnnnnnnnnnnnnnnnnnnnnnnnnnnnnnnnnnnnnnnnnnnnnnnnnnnnnnnnnnnnnnnnnnnnnnnnnnnnnnnnnnnnnnnnnnnnnnnnnnnnnnnnnnnnnnnnnnnnnnnnnnnnnnnnnnnnnnnnnnnnnnnnnnnnnnnnnnnnnnnnnnnnnnnnnnnnnnnnnnnnnnnnnnnnnnnnnnnnnnnnnnnnnnnnnnnnnnnnnnnnnnnnnnnnnnnnnnnnnnnnnnnnnnnnnnnnnnnnnnnnnnnnnnnnnnnnnnnnnnnnnnnnnnnnnnnnnnnnnnnnnnnnnnnnnnnnnnnnnnnnnnnnnnnnnnnnnnnnnnnnnnnnnnnnnnnnnnnnnnnnnnnnnnnnnnnnnnnnnnnnnnnnnnnnnnnnnnnnnnnnnnnnnnnnnnnnnnnnnnnnnnnnnnnnnnnnnnnnnnnnnnnnnnnnnnnnnnnnnnnnnnnnnnnnnnnnnnnnnnnnnnnnnnnnnnnnnnnnnnnnnnnnnnnnnnnnnnnnnnnnnnnnnnnnnnnnnnnnnnnnnnnnnnnnnnnnnnnnnnnnnnnnnnnnnnnnnnnnnnnnnnnnnnnnnnnnnnnnnnnnnnnnnnnnnnnnnnnnnnnnnnnnnnnnnnnnnnnnnnnnnnnnnnnnnnnnnnnnnnnnnnnnnnnnnnnnnnnnnnnnnnnnnnnnnnnnnnnnnnnnnnnnnnnnnnnnnnnnnnnnnnnnnnnnnnnnnnnnnnnnnnnnnnnnnnnnnnnnnnnnnnnnnnnnnnnnnnnnnnnnnnnnnnnnnnnnnnnnnnnnnnnnnnnnnnnnnnnnnnnnnnnnnnnnnnnnnnnnnnnnnnnnnnnnnnnnnnnnnnnnnnnnnnnnnnnnnnnnnnnnnnnnnnnnnnnnnnnnnnnnnnnnnnnnnnnnnnnnnnnnnnnnnnnnnnnnnnnnnnnnnnnnnnnnnnnnnnnnnnnnnnnnnnnnnnnnnnnnnnnnnnnnnnnnnnnnnnnnnnnnnnnnnnnnnnnnnnnnnnnnnnnnnnnnnnnnnnnnnnnnnnnnnnnnnnnnnnnnnnnnnnnnnnnnnnnnnnnnnnnnnnnnnnnnnnnnnnnnnnnnnnnnnnnnnnnnnnnnnnnnnnnnnnnnnnnnnnnnnnnnnnnnnnnnnnnnnnnnnnnnnnnnnnnnnnnnnnnnnnnnnnnnnnnnnnnnnnnnnnnnnnnnnnnnnnnnnnnnnnnnnnnnnnnnnnnnnnnnnnnnnnnnnnnnnnnnnnnnnnnnnnnnnnnnnnnnnnnnnnnnnnnnnnnnnnnnnnnnnnnnnnnnnnnnnnnnnnnnnnnnnnnnnnnnnnnnnnnnnnnnnnnnnnnnnnnnnnnnnnnnnnnnnnnnnnnnnnnnnnnnnnnnnnnnnnnnnnnnnnnnnnnnnnnnnnnnnnnnnnnnnnnnnnnnnnnnnnnnnnnnnnnnnnnnnnnnnnnnnnnnnnnnnnnnnnnnnnnnnnnnnnnnnnnnnnnnnnnnnnnnnnnnnnnnnnnnnnnnnnnnnnnnnnnnnnnnnnnnnnnnnnnnnnnnnnnnnnnnnnnnnnnnnnnnnnnnnnnnnnnnnnnnnnnnnnnnnnnnnnnnnnnnnnnnnnnnnnnnnnnnnnnnnnnnnnnnnnnnnnnnnnnnnnnnnnnnnnnnnnnnnnnnnnnnnnnnnnnnnnnnnnnnnnnnnnnnnnnnnnnnnnnnnnnnnnnnnnnnnnnnnnnnnnnnnnnnnnnnnnnnnnnnnnnnnnnnnnnnnnnnnnnnnnnnnnnnnnnnnnnnnnnnnnnnnnnnnnnnnnnnnnnnnnnnnnnnnnnnnnnnnnnnnnnnnnnnnnnnnnnnnnnnnnnnnnnnnnnnnnnnnnnnnnnnnnnnnnnnnnnnnnnnnnnnnnnnnnnnnnnnnnnnnnnnnnnnnnnnnnnnnnnnnnnnnnnnnnnnnnnnnnnnnnnnnnnnnnnnnnnnnnnnnnnnnnnnnnnnnnnnnnnnnnnnnnnnnnnnnnnnnnnnnnnnnnnnnnnnnnnnnnnnnnnnnnnnnnnnnnnnnnnnnnnnnnnnnnnnnnnnnnnnnnnnnnnnnnnnnnnnnnnnnnnnnnnnnnnnnnnnnnnnnnnnnnnnnnnnnnnnnnnnnnnnnnnnnnnnnnnnnnnnnnnnnnnnnnnnnnnnnnnnnnnnnnnnnnnnnnnnnnnnnnnnnnnnnnnnnnnnnnnnnnnnnnnnnnnnnnnnnnnnnnnnnnnnnnnnnnnnnnnnnnnnnnnnnnnnnnnnnnnnnnnnnnnnnnnnnnnnnnnnnnnnnnnnnnnnnnnnnnnnnnnnnnnnnnnnnnnnnnnnnnnnnnnnnnnnnnnnnnnnnnnnnnnnnnnnnnnnnnnnnnnnnnnnnnnnnnnnnnnnnnnnnnnnnnnnnnnnnnnnnnnnnnnnnnnnnnnnnnnnnnnnnnnnnnnnnnnnnnnnnnnnnnnnnnnnnnnnnnnnnnnnnnnnnnnnnnnnnnnnnnnnnnnnnnnnnnnnnnnnnnnnnnnnnnnnnnnnnnnnnnnnnnnnnnnnnnnnnnnnnnnnnnnnnnnnnnnnnnnnnnnnnnnnnnnnnnnnnnnnnnnnnnnnnnnnnnnnnnnnnnnnnnnnnnnnnnnnnnnnnnnnnnnnnnnnnnnnnnnnnnnnnnnnnnnnnnnnnnnnnnnnnnnnnnnnnnnnnnnnnnnnnnnnnnnnnnnnnnnnnnnnnnnnnnnnnnnnnnnnnnnnnnnnnnnnnnnnnnnnnnnnnnnnnnnnnnnnnnnnnnnnnnnnnnnnnnnnnnnnnnnnnnnnnnnnnnnnnnnnnnnnnnnnnnnnnnnnnnnnnnnnnnnnnnnnnnnnnnnnnnnnnnnnnnnnnnnnnnnnnnnnnnnnnnnnnnnnnnnnnnnnnnnnnnnnnnnnnnnnnnnnnnnnnnnnnnnnnnnnnnnnnnnnnnnnnnnnnnnnnnnnnnnnnnnnnnnnnnnnnnnnnnnnnnnnnnnnnnnnnnnnnnnnnnnnnnnnnnnnnnnnnnnnnnnnnnnnnnnnnnnnnnnnnnnnnnnnnnnnnnnnnnnnnnnnnnnnnnnnnnnnnnnnnnnnnnnnnnnnnnnnnnnnnnnnnnnnnnnnnnnnnnnnnnnnnnnnnnnnnnnnnnnnnnnnnnnnnnnnnnnnnnnnnnnnnnnnnnnnnnnnnnnnnnnnnnnnnnnnnnnnnnnnnnnnnnnnnnnnnnnnnnnnnnnnnnnnnnnnnnnnnnnnnnnnnnnnnnnnnnnnnnnnnnnnnnnnnnnnnnnnnnnnnnnnnnnnnnnnnnnnnnnnnnnnnnnnnnnnnnnnnnnnnnnnnnnnnnnnnnnnnnnnnnnnnnnnnnnnnnnnnnnnnnnnnnnnnnnnnnnnnnnnnnnnnnnnnnnnnnnnnnnnnnnnnnnnnnnnnnnnnnnnnnnnnnnnnnnnnnnnnnnnnnnnnnnnnnnnnnnnnnnnnnnnnnnnnnnnnnnnnnnnnnnnnnnnnnnnnnnnnnnnnnnnnnnnnnnnnnnnnnnnnnnnnnnnnnnnnnnnnnnnnnnnnnnnnnnnnnnnnnnnnnnnnnnnnnnnnnnnnnnnnnnnnnnnnnnnnnnnnnnnnnnnnnnnnnnnnnnnnnnnnnnnnnnnnnnnnnnnnnnnnnnnnnnnnnnnnnnnnnnnnnnnnnnnnnnnnnnnnnnnnnnnnnnnnnnnnnnnnnnnnnnnnnnnnnnnnnnnnnnnnnnnnnnnnnnnnnnnnnnnnnnnnnnnnnnnnnnnnnnnnnnnnnnnnnnnnnnnnnnnnnnnnnnnnnnnnnnnnnnnnnnnnnnnnnnnnnnnnnnnnnnnnnnnnnnnnnnnnnnnnnnnnnnnnnnnnnnnnnnnnnnnnnnnnnnnnnnnnnnnnnnnnnnnnnnnnnnnnnnnnnnnnnnnnnnnnnnnnnnnnnnnnnnnnnnnnnnnnnnnnnnnnnnnnnnnnnnnnnnnnnnnnnnnnnnnnnnnnnnnnnnnnnnnnnnnnnnnnnnnnnnnnnnnnnnnnnnnnnnnnnnnnnnnnnnnnnnnnnnnnnnnnnnnnnnnnnnnnnnnnnnnnnnnnnnnnnnnnnnnnnnnnnnnnnnnnnnnnnnnnnnnnnnnnnnnnnnnnnnnnnnnnnnnnnnnnnnnnnnnnnnnnnnnnnnnnnnnnnnnnnnnnnnnnnnnnnnnnnnnnnnnnnnnnnnnnnnnnnnnnnnnnnnnnnnnnnnnnnnnnnnnnnnnnnnnnnnnnnnnnnnnnnnnnnnnnnnnnnnnnnnnnnnnnnnnnnnnnnnnnnnnnnnnnnnnnnnnnnnnnnnnnnnnnnnnnnnnnnnnnnnnnnnnnnnnnnnnnnnnnnnnnnnnnnnnnnnnnnnnnnnnnnnnnnnnnnnnnnnnnnnnnnnnnnnnnnnnnnnnnnnnnnnnnnnnnnnnnnnnnnnnnnnnnnnnnnnnnnnnnnnnnnnnnnnnnnnnnnnnnnnnnnnnnnnnnnnnnnnnnnnnnnnnnnnnnnnnnnnnnnnnnnnnnnnnnnnnnnnnnnnnnnnnnnnnnnnnnnnnnnnnnnnnnnnnnnnnnnnnnnnnnnnnnnnnnnnnnnnnnnnnnnnnnnnnnnnnnnnnnnnnnnnnnnnnnnnnnnnnnnnnnnnnnnnnnnnnnnnnnnnnnnnnnnnnnnnnnnnnnnnnnnnnnnnnnnnnnnnnnnnnnnnnnnnnnnnnnnnnnnnnnnnnnnnnnnnnnnnnnnnnnnnnnnnnnnnnnnnnnnnnnnnnnnnnnnnnnnnnnnnnnnnnnnnnnnnnnnnnnnnnnnnnnnnnnnnnnnnnnnnnnnnnnnnnnnnnnnnnnnnnnnnnnnnnnnnnnnnnnnnnnnnnnnnnnnnnnnnnnnnnnnnnnnnnnnnnnnnnnnnnnnnnnnnnnnnnnnnnnnnnnnnnnnnnnnnnnnnnnnnnnnnnnnnnnnnnnnnnnnnnnnnnnnnnnnnnnnnnnnnnnnnnnnnnnnnnnnnnnnnnnnnnnnnnnnnnnnnnnnnnnnnnnnnnnnnnnnnnnnnnnnnnnnnnnnnnnnnnnnnnnnnnnnnnnnnnnnnnnnnnnnnnnnnnnnnnnnnnnnnnnnnnnnnnnnnnnnnnnnnnnnnnnnnnnnnnnnnnnnnnnnnnnnnnnnnnnnnnnnnnnnnnnnnnnnnnnnnnnnnnnnnnnnnnnnnnnnnnnnnnnnnnnnnnnnnnnnnnnnnnnnnnnnnnnnnnnnnnnnnnnnnnnnnnnnnnnnnnnnnnnnnnnnnnnnnnnnnnnnnnnnnnnnnnnnnnnnnnnnnnnnnnnnnnnnnnnnnnnnnnnnnnnnnnnnnnnnnnnnnnnnnnnnnnnnnnnnnnnnnnnnnnnnnnnnnnnnnnnnnnnnnnnnnnnnnnnnnnnnnnnnnnnnnnnnnnnnnnnnnnnnnnnnnnnnnnnnnnnnnnnnnnnnnnnnnnnnnnnnnnnnnnnnnnnnnnnnnnnnnnnnnnnnnnnnnnnnnnnnnnnnnnnnnnnnnnnnnnnnnnnnnnnnnnnnnnnnnnnnnnnnnnnnnnnnnnnnnnnnnnnnnnnnnnnnnnnnnnnnnnnnnnnnnnnnnnnnnnnnnnnnnnnnnnnnnnnnnnnnnnnnnnnnnnnnnnnnnnnnnnnnnnnnnnnnnnnnnnnnnnnnnnnnnnnnnnnnnnnnnnnnnnnnnnnnnnnnnnnnnnnnnnnnnnnnnnnnnnnnnnnnnnnnnnnnnnnnnnnnnnnnnnnnnnnnnnnnnnnnnnnnnnnnnnnnnnnnnnnnnnnnnnnnnnnnnnnnnnnnnnnnnnnnnnnnnnnnnnnnnnnnnnnnnnnnnnnnnnnnnnnnnnnnnnnnnnnnnnnnnnnnnnnnnnnnnnnnnnnnnnnnnnnnnnnnnnnnnnnnnnnnnnnnnnnnnnnnnnnnnnnnnnnnnnnnnnnnnnnnnnnnnnnnnnnnnnnnnnnnnnnnnnnnnnnnnnnnnnnnnnnnnnnnnnnnnnnnnnnnnnnnnnnnnnnnnnnnnnnnnnnnnnnnnnnnnnnnnnnnnnnnnnnnnnnnnnnnnnnnnnnnnnnnnnnnnnnnnnnnnnnnnnnnnnnnnnnnnnnnnnnnnnnnnnnnnnnnnnnnnnnnnnnnnnnnnnnnnnnnnnnnnnnnnnnnnnnnnnnnnnnnnnnnnnnnnnnnnnnnnnnnnnnnnnnnnnnnnnnnnnnnnnnnnnnnnnnnnnnnnnnnnnnnnnnnnnnnnnnnnnnnnnnnnnnnnnnnnnnnnnnnnnnnnnnnnnnnnnnnnnnnnnnnnnnnnnnnnnnnnnnnnnnnnnnnnnnnnnnnnnnnnnnnnnnnnnnnnnnnnnnnnnnnnnnnnnnnnnnnnnnnnnnnnnnnnnnnnnnnnnnnnnnnnnnnnnnnnnnnnnnnnnnnnnnnnnnnnnnnnnnnnnnnnnnnnnnnnnnnnnnnnnnnnnnnnnnnnnnnnnnnnnnnnnnnnnnnnnnnnnnnnnnnnnnnnnnnnnnnnnnnnnnnnnnnnnnnnnnnnnnnnnnnnnnnnnnnnnnnnnnnnnnnnnnnnnnnnnnnnnnnnnnnnnnnnnnnnnnnnnnnnnnnnnnnnnnnnnnnnnnnnnnnnnnnnnnnnnnnnnnnnnnnnnnnnnnnnnnnnnnnnnnnnnnnnnnnnnnnnnnnnnnnnnnnnnnnnnnnnnnnnnnnnnnnnnnnnnnnnnnnnnnnnnnnnnnnnnnnnnnnnnnnnnnnnnnnnnnnnnnnnnnnnnnnnnnnnnnnnnnnnnnnnnnnnnnnnnnnnnnnnnnnnnnnnnnnnnnnnnnnnnnnnnnnnnnnnnnnnnnnnnnnnnnnnnnnnnnnnnnnnnnnnnnnnnnnnnnnnnnnnnnnnnnnnnnnnnnnnnnnnnnnnnnnnnnnnnnnnnnnnnnnnnnnnnnnnnnnnnnnnnnnnnnnnnnnnnnnnnnnnnnnnnnnnnnnnnnnnnnnnnnnnnnnnnnnnnnnnnnnnnnnnnnnnnnnnnnnnnnnnnnnnnnnnnnnnnnnnnnnnnnnnnnnnnnnnnnnnnnnnnnnnnnnnnnnnnnnnnnnnnnnnnnnnnnnnnnnnnnnnnnnnnnnnnnnnnnnnnnnnnnnnnnnnnnnnnnnnnnnnnnnnnnnnnnnnnnnnnnnnnnnnnnnnnnnnnnnnnnnnnnnnnnnnnnnnnnnnnnnnnnnnnnnnnnnnnnnnnnnnnnnnnnnnnnnnnnnnnnnnnnnnnnnnnnnnnnnnnnnnnnnnnnnnnnnnnnnnnnnnnnnnnnnnnnnnnnnnnnnnnnnnnnnnnnnnnnnnnnnnnnnnnnnnnnnnnnnnnnnnnnnnnnnnnnnnnnnnnnnnnnnnnnnnnnnnnnnnnnnnnnnnnnnnnnnnnnnnnnnnnnnnnnnnnnnnnnnnnnnnnnnnnnnnnnnnnnnnnnnnnnnnnnnnnnnnnnnnnnnnnnnnnnnnnnnnnnnnnnnnnnnnnnnnnnnnnnnnnnnnnnnnnnnnnnnnnnnnnnnnnnnnnnnnnnnnnnnnnnnnnnnnnnnnnnnnnnnnnnnnnnnnnnnnnnnnnnnnnnnnnnnnnnnnnnnnnnnnnnnnnnnnnnnnnnnnnnnnnnnnnnnnnnnnnnnnnnnnnnnnnnnnnnnnnnnnnnnnnnnnnnnnnnnnnnnnnnnnnnnnnnnnnnnnnnnnnnnnnnnnnnnnnnnnnnnnnnnnnnnnnnnnnnnnnnnnnnnnnnnnnnnnnnnnnnnnnnnnnnnnnnnnnnnnnnnnnnnnnnnnnnnnnnnnnnnnnnnnnnnnnnnnnnnnnnnnnnnnnnnnnnnnnnnnnnnnnnnnnnnnnnnnnnnnnnnnnnnnnnnnnnnnnnnnnnnnnnnnnnnnnnnnnnnnnnnnnnnnnnnnnnnnnnnnnnnnnnnnnnnnnnnnnnnnnnnnnnnnnnnnnnnnnnnnnnnnnnnnnnnnnnnnnnnnnnnnnnnnnnnnnnnnnnnnnnnnnnnnnnnnnnnnnnnnnnnnnnnnnnnnnnnnnnnnnnnnnnnnnnnnnnnnnnnnnnnnnnnnnnnnnnnnnnnnnnnnnnnnnnnnnnnnnnnnnnnnnnnnnnnnnnnnnnnnnnnnnnnnnnnnnnnnnnnnnnnnnnnnnnnnnnnnnnnnnnnnnnnnnnnnnnnnnnnnnnnnnnnnnnnnnnnnnnnnnnnnnnnnnnnnnnnnnnnnnnnnnnnnnnnnnnnnnnnnnnnnnnnnnnnnnnnnnnnnnnnnnnnnnnnnnnnnnnnnnnnnnnnnnnnnnnnnnnnnnnnnnnnnnnnnnnnnnnnnnnnnnnnnnnnnnnnnnnnnnnnnnnnnnnnnnnnnnnnnnnnnnnnnnnnnnnnnnnnnnnnnnnnnnnnnnnnnnnnnnnnnnnnnnnnnnnnnnnnnnnnnnnnnnnnnnnnnnnnnnnnnnnnnnnnnnnnnnnnnnnnnnnnnnnnnnnnnnnnnnnnnnnnnnnnnnnnnnnnnnnnnnnnnnnnnnnnnnnnnnnnnnnnnnnnnnnnnnnnnnnnnnnnnnnnnnnnnnnnnnnnnnnnnnnnnnnnnnnnnnnnnnnnnnnnnnnnnnnnnnnnnnnnnnnnnnnnnnnnnnnnnnnnnnnnnnnnnnnnnnnnnnnnnnnnnnnnnnnnnnnnnnnnnnnnnnnnnnnnnnnnnnnnnnnnnnnnnnnnnnnnnnnnnnnnnnnnnnnnnnnnnnnnnnnnnnnnnnnnnnnnnnnnnnnnnnnnnnnnnnnnnnnnnnnnnnnnnnnnnnnnnnnnnnnnnnnnnnnnnnnnnnnnnnnnnnnnnnnnnnnnnnnnnnnnnnnnnnnnnnnnnnnnnnnnnnnnnnnnnnnnnnnnnnnnnnnnnnnnnnnnnnnnnnnnnnnnnnnnnnnnnnnnnnnnnnnnnnnnnnnnnnnnnnnnnnnnnnnnnnnnnnnnnnnnnnnnnnnnnnnnnnnnnnnnnnnnnnnnnnnnnnnnnnnnnnnnnnnnnnnnnnnnnnnnnnnnnnnnnnnnnnnnnnnnnnnnnnnnnnnnnnnnnnnnnnnnnnnnnnnnnnnnnnnnnnnnnnnnnnnnnnnnnnnnnnnnnnnnnnnnnnnnnnnnnnnnnnnnnnnnnnnnnnnnnnnnnnnnnnnnnnnnnnnnnnnnnnnnnnnnnnnnnnnnnnnnnnnnnnnnnnnnnnnnnnnnnnnnnnnnnnnnnnnnnnnnnnnnnnnnnnnnnnnnnnnnnnnnnnnnnnnnnnnnnnnnnnnnnnnnnnnnnnnnnnnnnnnnnnnnnnnnnnnnnnnnnnnnnnnnnnnnnnnnnnnnnnnnnnnnnnnnnnnnnnnnnnnnnnnnnnnnnnnnnnnnnnnnnnnnnnnnnnnnnnnnnnnnnnnnnnnnnnnnnnnnnnnnnnnnnnnnnnnnnnnnnnnnnnnnnnnnnnnnnnnnnnnnnnnnnnnnnnnnnnnnnnnnnnnnnnnnnnnnnnnnnnnnnnnnnnnnnnnnnnnnnnnnnnnnnnnnnnnnnnnnnnnnnnnnnnnnnnnnnnnnnnnnnnnnnnnnnnnnnnnnnnnnnnnnnnnnnnnnnnnnnnnnnnnnnnnnnnnnnnnnnnnnnnnnnnnnnnnnnnnnnnnnnnnnnnnnnnnnnnnnnnnnnnnnnnnnnnnnnnnnnnnnnnnnnnnnnnnnnnnnnnnnnnnnnnnnnnnnnnnnnnnnnnnnnnnnnnnnnnnnnnnnnnnnnnnnnnnnnnnnnnnnnnnnnnnnnnnnnnnnnnnnnnnnnnnnnnnnnnnnnnnnnnnnnnnnnnnnnnnnnnnnnnnnnnnnnnnnnnnnnnnnnnnnnnnnnnnnnnnnnnnnnnnnnnnnnnnnnnnnnnnnnnnnnnnnnnnnnnnnnnnnnnnnnnnnnnnnnnnnnnnnnnnnnnnnnnnnnnnnnnnnnnnnnnnnnnnnnnnnnnnnnnnnnnnnnnnnnnnnnnnnnnnnnnnnnnnnnnnnnnnnnnnnnnnnnnnnnnnnnnnnnnnnnnnnnnnnnnnnnnnnnnnnnnnnnnnnnnnnnnnnnnnnnnnnnnnnnnnnnnnnnnnnnnnnnnnnnnnnnnnnnnnnnnnnnnnnnnnnnnnnnnnnnnnnnnnnnnnnnnnnnnnnnnnnnnnnnnnnnnnnnnnnnnnnnnnnnnnnnnnnnnnnnnnnnnnnnnnnnnnnnnnnnnnnnnnnnnnnnnnnnnnnnnnnnnnnnnnnnnnnnnnnnnnnnnnnnnnnnnnnnnnnnnnnnnnnnnnnnnnnnnnnnnnnnnnnnnnnnnnnnnnnnnnnnnnnnnnnnnnnnnnnnnnnnnnnnnnnnnnnnnnnnnnnnnnnnnnnnnnnnnnnnnnnnnnnnnnnnnnnnnnnnnnnnnnnnnnnnnnnnnnnnnnnnnnnnnnnnnnnnnnnnnnnnnnnnnnnnnnnnnnnnnnnnnnnnnnnnnnnnnnnnnnnnnnnnnnnnnnnnnnnnnnnnnnnnnnnnnnnnnnnnnnnnnnnnnnnnnnnnnnnnnnnnnnnnnnnnnnnnnnnnnnnnnnnnnnnnnnnnnnnnnnnnnnnnnnnnnnnnnnnnnnnnnnnnnnnnnnnnnnnnnnnnnnnnnnnnnnnnnnnnnnnnnnnnnnnnnnnnnnnnnnnnnnnnnnnnnnnnnnnnnnnnnnnnnnnnnnnnnnnnnnnnnnnnnnnnnnnnnnnnnnnnnnnnnnnnnnnnnnnnnnnnnnnnnnnnnnnnnnnnnnnnnnnnnnnnnnnnnnnnnnnnnnnnnnnnnnnnnnnnnnnnnnnnnnnnnnnnnnnnnnnnnnnnnnnnnnnnnnnnnnnnnnnnnnnnnnnnnnnnnnnnnnnnnnnnnnnnnnnnnnnnnnnnnnnnnnnnnnnnnnnnnnnnnnnnnnnnnnnnnnnnnnnnnnnnnnnnnnnnnnnnnnnnnnnnnnnnnnnnnnnnnnnnnnnnnnnnnnnnnnnnnnnnnnnnnnnnnnnnnnnnnnnnnnnnnnnnnnnnnnnnnnnnnnnnnnnnnnnnnnnnnnnnnnnnnnnnnnnnnnnnnnnnnnnnnnnnnnnnnnnnnnnnnnnnnnnnnnnnnnnnnnnnnnnnnnnnnnnnnnnnnnnnnnnnnnnnnnnnnnnnnnnnnnnnnnnnnnnnnnnnnnnnnnnnnnnnnnnnnnnnnnnnnnnnnnnnnnnnnnnnnnnnnnnnnnnnnnnnnnnnnnnnnnnnnnnnnnnnnnnnnnnnnnnnnnnnnnnnnnnnnnnnnnnnnnnnnnnnnnnnnnnnnnnnnnnnnnnnnnnnnnnnnnnnnnnnnnnnnnnnnnnnnnnnnnnnnnnnnnnnnnnnnnnnnnnnnnnnnnnnnnnnnnnnnnnnnnnnnnnnnnnnnnnnnnnnnnnnnnnnnnnnnnnnnnnnnnnnnnnnnnnnnnnnnnnnnnnnnnnnnnnnnnnnnnnnnnnnnnnnnnnnnnnnnnnnnnnnnnnnnnnnnnnnnnnnnnnnnnnnnnnnnnnnnnnnnnnnnnnnnnnnnnnnnnnnnnnnnnnnnnnnnnnnnnnnnnnnnnnnnnnnnnnnnnnnnnnnnnnnnnnnnnnnnnnnnnnnnnnnnnnnnnnnnnnnnnnnnnnnnnnnnnnnnnnnnnnnnnnnnnnnnnnnnnnnnnnnnnnnnnnnnnnnnnnnnnnnnnnnnnnnnnnnnnnnnnnnnnnnnnnnnnnnnnnnnnnnnnnnnnnnnnnnnnnnnnnnnnnnnnnnnnnnnnnnnnnnnnnnnnnnnnnnnnnnnnnnnnnnnnnnnnnnnnnnnnnnnnnnnnnnnnnnnnnnnnnnnnnnnnnnnnnnnnnnnnnnnnnnnnnnnnnnnnnnnnnnnnnnnnnnnnnnnnnnnnnnnnnnnnnnnnnnnnnnnnnnnnnnnnnnnnnnnnnnnnnnnnnnnnnnnnnnnnnnnnnnnnnnnnnnnnnnnnnnnnnnnnnnnnnnnnnnnnnnnnnnnnnnnnnnnnnnnnnnnnnnnnnnnnnnnnnnnnnnnnnnnnnnnnnnnnnnnnnnnnnnnnnnnnnnnnnnnnnnnnnnnnnnnnnnnnnnnnnnnnnnnnnnnnnnnnnnnnnnnnnnnnnnnnnnnnnnnnnnnnnnnnnnnnnnnnnnnnnnnnnnnnnnnnnnnnnnnnnnnnnnnnnnnnnnnnnnnnnnnnnnnnnnnnnnnnnnnnnnnnnnnnnnnnnnnnnnnnnnnnnnnnnnnnnnnnnnnnnnnnnnnnnnnnnnnnnnnnnnnnnnnnnnnnnnnnnnnnnnnnnnnnnnnnnnnnnnnnnnnnnnnnnnnnnnnnnnnnnnnnnnnnnnnnnnnnnnnnnnnnnnnnnnnnnnnnnnnnnnnnnnnnnnnnnnnnnnnnnnnnnnnnnnnnnnnnnnnnnnnnnnnnnnnnnnnnnnnnnnnnnnnnnnnnnnnnnnnnnnnnnnnnnnnnnnnnnnnnnnnnnnnnnnnnnnnnnnnnnnnnnnnnnnnnnnnnnnnnnnnnnnnnnnnnnnnnnnnnnnnnnnnnnnnnnnnnnnnnnnnnnnnnnnnnnnnnnnnnnnnnnnnnnnnnnnnnnnnnnnnnnnnnnnnnnnnnnnnnnnnnnnnnnnnnnnnnnnnnnnnnnnnnnnnnnnnnnnnnnnnnnnnnnnnnnnnnnnnnnnnnnnnnnnnnnnnnnnnnnnnnnnnnnnnnnnnnnnnnnnnnnnnnnnnnnnnnnnnnnnnnnnnnnnnnnnnnnnnnnnnnnnnnnnnnnnnnnnnnnnnnnnnnnnnnnnnnnnnnnnnnnnnnnnnnnnnnnnnnnnnnnnnnnnnnnnnnnnnnnnnnnnnnnnnnnnnnnnnnnnnnnnnnnnnnnnnnnnnnnnnnnnnnnnnnnnnnnnnnnnnnnnnnnnnnnnnnnnnnnnnnnnnnnnnnnnnnnnnnnnnnnnnnnnnnnnnnnnnnnnnnnnnnnnnnnnnnnnnnnnnnnnnnnnnnnnnnnnnnnnnnnnnnnnnnnnnnnnnnnnnnnnnnnnnnnnnnnnnnnnnnnnnnnnnnnnnnnnnnnnnnnnnnnnnnnnnnnnnnnnnnnnnnnnnnnnnnnnnnnnnnnnnnnnnnnnnnnnnnnnnnnnnnnnnnnnnnnnnnnnnnnnnnnnnnnnnnnnnnnnnnnnnnnnnnnnnnnnnnnnnnnnnnnnnnnnnnnnnnnnnnnnnnnnnnnnnnnnnnnnnnnnnnnnnnnnnnnnnnnnnnnnnnnnnnnnnnnnnnnnnnnnnnnnnnnnnnnnnnnnnnnnnnnnnnnnnnnnnnnnnnnnnnnnnnnnnnnnnnnnnnnnnnnnnnnnnnnnnnnnnnnnnnnnnnnnnnnnnnnnnnnnnnnnnnnnnnnnnnnnnnnnnnnnnnnnnnnnnnnnnnnnnnnnnnnnnnnnnnnnnnnnnnnnnnnnnnnnnnnnnnnnnnnnnnnnnnnnnnnnnnnnnnnnnnnnnnnnnnnnnnnnnnnnnnnnnnnnnnnnnnnnnnnnnnnnnnnnnnnnnnnnnnnnnnnnnnnnnnnnnnnnnnnnnnnnnnnnnnnnnnnnnnnnnnnnnnnnnnnnnnnnnnnnnnnnnnnnnnnnnnnnnnnnnnnnnnnnnnnnnnnnnnnnnnnnnnnnnnnnnnnnnnnnnnnnnnnnnnnnnnnnnnnnnnnnnnnnnnnnnnnnnnnnnnnnnnnnnnnnnnnnnnnnnnnnnnnnnnnnnnnnnnnnnnnnnnnnnnnnnnnnnnnnnnnnnnnnnnnnnnnnnnnnnnnnnnnnnnnnnnnnnnnnnnnnnnnnnnnnnnnnnnnnnnnnnnnnnnnnnnnnnnnnnnnnnnnnnnnnnnnnnnnnnnnnnnnnnnnnnnnnnnnnnnnnnnnnnnnnnnnnnnnnnnnnnnnnnnnnnnnnnnnnnnnnnnnnnnnnnnnnnnnnnnnnnnnnnnnnnnnnnnnnnnnnnnnnnnnnnnnnnnnnnnnnnnnnnnnnnnnnnnnnnnnnnnnnnnnnnnnnnnnnnnnnnnnnnnnnnnnnnnnnnnnnnnnnnnnnnnnnnnnnnnnnnnnnnnnnnnnnnnnnnnnnnnnnnnnnnnnnnnnnnnnnnnnnnnnnnnnnnnnnnnnnnnnnnnnnnnnnnnnnnnnnnnnnnnnnnnnnnnnnnnnnnnnnnnnnnnnnnnnnnnnnnnnnnnnnnnnnnnnnnnnnnnnnnnnnnnnnnnnnnnnnnnnnnnnnnnnnnnnnnnnnnnnnnnnnnnnnnnnnnnnnnnnnnnnnnnnnnnnnnnnnnnnnnnnnnnnnnnnnnnnnnnnnnnnnnnnnnnnnnnnnnnnnnnnnnnnnnnnnnnnnnnnnnnnnnnnnnnnnnnnnnnnnnnnnnnnnnnnnnnnnnnnnnnnnnnnnnnnnnnnnnnnnnnnnnnnnnnnnnnnnnnnnnnnnnnnnnnnnnnnnnnnnnnnnnnnnnnnnnnnnnnnnnnnnnnnnnnnnnnnnnnnnnnnnnnnnnnnnnnnnnnnnnnnnnnnnnnnnnnnnnnnnnnnnnnnnnnnnnnnnnnnnnnnnnnnnnnnnnnnnnnnnnnnnnnnnnnnnnnnnnnnnnnnnnnnnnnnnnnnnnnnnnnnnnnnnnnnnnnnnnnnnnnnnnnnnnnnnnnnnnnnnnnnnnnnnnnnnnnnnnnnnnnnnnnnnnnnnnnnnnnnnnnnnnnnnnnnnnnnnnnnnnnnnnnnnnnnnnnnnnnnnnnnnnnnnnnnnnnnnnnnnnnnnnnnnnnnnnnnnnnnnnnnnnnnnnnnnnnnnnnnnnnnnnnnnnnnnnnnnnnnnnnnnnnnnnnnnnnnnnnnnnnnnnnnnnnnnnnnnnnnnnnnnnnnnnnnnnnnnnnnnnnnnnnnnnnnnnnnnnnnnnnnnnnnnnnnnnnnnnnnnnnnnnnnnnnnnnnnnnnnnnnnnnnnnnnnnnnnnnnnnnnnnnnnnnnnnnnnnnnnnnnnnnnnnnnnnnnnnnnnnnnnnnnnnnnnnnnnnnnnnnnnnnnnnnnnnnnnnnnnnnnnnnnnnnnnnnnnnnnnnnnnnnnnnnnnnnnnnnnnnnnnnnnnnnnnnnnnnnnnnnnnnnnnnnnnnnnnnnnnnnnnnnnnnnnnnnnnnnnnnnnnnnnnnnnnnnnnnnnnnnnnnnnnnnnnnnnnnnnnnnnnnnnnnnnnnnnnnnnnnnnnnnnnnnnnnnnnnnnnnnnnnnnnnnnnnnnnnnnnnnnnnnnnnnnnnnnnnnnnnnnnnnnnnnnnnnnnnnnnnnnnnnnnnnnnnnnnnnnnnnnnnnnnnnnnnnnnnnnnnnnnnnnnnnnnnnnnnnnnnnnnnnnnnnnnnnnnnnnnnnnnnnnnnnnnnnnnnnnnnnnnnnnnnnnnnnnnnnnnnnnnnnnnnnnnnnnnnnnnnnnnnnnnnnnnnnnnnnnnnnnnnnnnnnnnnnnnnnnnnnnnnnnnnnnnnnnnnnnnnnnnnnnnnnnnnnnnnnnnnnnnnnnnnnnnnnnnnnnnnnnnnnnnnnnnnnnnnnnnnnnnnnnnnnnnnnnnnnnnnnnnnnnnnnnnnnnnnnnnnnnnnnnnnnnnnnnnnnnnnnnnnnnnnnnnnnnnnnnnnnnnnnnnnnnnnnnnnnnnnnnnnnnnnnnnnnnnnnnnnnnnnnnnnnnnnnnnnnnnnnnnnnnnnnnnnnnnnnnnnnnnnnnnnnnnnnnnnnnnnnnnnnnnnnnnnnnnnnnnnnnnnnnnnnnnnnnnnnnnnnnnnnnnnnnnnnnnnnnnnnnnnnnnnnnnnnnnnnnnnnnnnnnnnnnnnnnnnnnnnnnnnnnnnnnnnnnnnnnnnnnnnnnnnnnnnnnnnnnnnnnnnnnnnnnnnnnnnnnnnnnnnnnnnnnnnnnnnnnnnnnnnnnnnnnnnnnnnnnnnnnnnnnnnnnnnnnnnnnnnnnnnnnnnnnnnnnnnnnnnnnnnnnnnnnnnnnnnnnnnnnnnnnnnnnnnnnnnnnnnnnnnnnnnnnnnnnnnnnnnnnnnnnnnnnnnnnnnnnnnnnnnnnnnnnnnnnnnnnnnnnnnnnnnnnnnnnnnnnnnnnnnnnnnnnnnnnnnnnnnnnnnnnnnnnnnnnnnnnnnnnnnnnnnnnnnnnnnnnnnnnnnnnnnnnnnnnnnnnnnnnnnnnnnnnnnnnnnnnnnnnnnnnnnnnnnnnnnnnnnnnnnnnnnnnnnnnnnnnnnnnnnnnnnnnnnnnnnnnnnnnnnnnnnnnnnnnnnnnnnnnnnnnnnnnnnnnnnnnnnnnnnnnnnnnnnnnnnnnnnnnnnnnnnnnnnnnnnnnnnnnnnnnnnnnnnnnnnnnnnnnnnnnnnnnnnnnnnnnnnnnnnnnnnnnnnnnnnnnnnnnnnnnnnnnnnnnnnnnnnnnnnnnnnnnnnnnnnnnnnnnnnnnnnnnnnnnnnnnnnnnnnnnnnnnnnnnnnnnnnnnnnnnnnnnnnnnnnnnnnnnnnnnnnnnnnnnnnnnnnnnnnnnnnnnnnnnnnnnnnnnnnnnnnnnnnnnnnnnnnnnnnnnnnnnnnnnnnnnnnnnnnnnnnnnnnnnnnnnnnnnnnnnnnnnnnnnnnnnnnnnnnnnnnnnnnnnnnnnnnnnnnnnnnnnnnnnnnnnnnnnnnnnnnnnnnnnnnnnnnnnnnnnnnnnnnnnnnnnnnnnnnnnnnnnnnnnnnnnnnnnnnnnnnnnnnnnnnnnnnnnnnnnnnnnnnnnnnnnnnnnnnnnnnnnnnnnnnnnnnnnnnnnnnnnnnnnnnnnnnnnnnnnnnnnnnnnnnnnnnnnnnnnnnnnnnnnnnnnnnnnnnnnnnnnnnnnnnnnnnnnnnnnnnnnnnnnnnnnnnnnnnnnnnnnnnnnnnnnnnnnnnnnnnnnnnnnnnnnnnnnnnnnnnnnnnnnnnnnnnnnnnnnnnnnnnnnnnnnnnnnnnnnnnnnnnnnnnnnnnnnnnnnnnnnnnnnnnnnnnnnnnnnnnnnnnnnnnnnnnnnnnnnnnnnnnnnnnnnnnnnnnnnnnnnnnnnnnnnnnnnnnnnnnnnnnnnnnnnnnnnnnnnnnnnnnnnnnnnnnnnnnnnnnnnnnnnnnnnnnnnnnnnnnnnnnnnnnnnnnnnnnnnnnnnnnnnnnnnnnnnnnnnnnnnnnnnnnnnnnnnnnnnnnnnnnnnnnnnnnnnnnnnnnnnnnnnnnnnnnnnnnnnnnnnnnnnnnnnnnnnnnnnnnnnnnnnnnnnnnnnnnnnnnnnnnnnnnnnnnnnnnnnnnnnnnnnnnnnnnnnnnnnnnnnnnnnnnnnnnnnnnnnnnnnnnnnnnnnnnnnnnnnnnnnnnnnnnnnnnnnnnnnnnnnnnnnnnnnnnnnnnnnnnnnnnnnnnnnnnnnnnnnnnnnnnnnnnnnnnnnnnnnnnnnnnnnnnnnnnnnnnnnnnnnnnnnnnnnnnnnnnnnnnnnnnnnnnnnnnnnnnnnnnnnnnnnnnnnnnnnnnnnnnnnnnnnnnnnnnnnnnnnnnnnnnnnnnnnnnnnnnnnnnnnnnnnnnnnnnnnnnnnnnnnnnnnnnnnnnnnnnnnnnnnnnnnnnnnnnnnnnnnnnnnnnnnnnnnnnnnnnnnnnnnnnnnnnnnnnnnnnnnnnnnnnnnnnnnnnnnnnnnnnnnnnnnnnnnnnnnnnnnnnnnnnnnnnnnnnnnnnnnnnnnnnnnnnnnnnnnnnnnnnnnnnnnnnnnnnnnnnnnnnnnnnnnnnnnnnnnnnnnnnnnnnnnnnnnnnnnnnnnnnnnnnnnnnnnnnnnnnnnnnnnnnnnnnnnnnnnnnnnnnnnnnnnnnnnnnnnnnnnnnnnnnnnnnnnnnnnnnnnnnnnnnnnnnnnnnnnnnnnnnnnnnnnnnnnnnnnnnnnnnnnnnnnnnnnnnnnnnnnnnnnnnnnnnnnnnnnnnnnnnnnnnnnnnnnnnnnnnnnnnnnnnnnnnnnnnnnnnnnnnnnnnnnnnnnnnnnnnnnnnnnnnnnnnnnnnnnnnnnnnnnnnnnnnnnnnnnnnnnnnnnnnnnnnnnnnnnnnnnnnnnnnnnnnnnnnnnnnnnnnnnnnnnnnnnnnnnnnnnnnnnnnnnnnnnnnnnnnnnnnnnnnnnnnnnnnnnnnnnnnnnnnnnnnnnnnnnnnnnnnnnnnnnnnnnnnnnnnnnnnnnnnnnnnnnnnnnnnnnnnnnnnnnnnnnnnnnnnnnnnnnnnnnnnnnnnnnnnnnnnnnnnnnnnnnnnnnnnnnnnnnnnnnnnnnnnnnnnnnnnnnnnnnnnnnnnnnnnnnnnnnnnnnnnnnnnnnnnnnnnnnnnnnnnnnnnnnnnnnnnnnnnnnnnnnnnnnnnnnnnnnnnnnnnnnnnnnnnnnnnnnnnnnnnnnnnnnnnnnnnnnnnnnnnnnnnnnnnnnnnnnnnnnnnnnnnnnnnnnnnnnnnnnnnnnnnnnnnnnnnnnnnnnnnnnnnnnnnnnnnnnnnnnnnnnnnnnnnnnnnnnnnnnnnnnnnnnnnnnnnnnnnnnnnnnnnnnnnnnnnnnnnnnnnnnnnnnnnnnnnnnnnnnnnnnnnnnnnnnnnnnnnnnnnnnnnnnnnnnnnnnnnnnnnnnnnnnnnnnnnnnnnnnnnnnnnnnnnnnnnnnnnnnnnnnnnnnnnnnnnnnnnnnnnnnnnnnnnnnnnnnnnnnnnnnnnnnnnnnnnnnnnnnnnnnnnnnnnnnnnnnnnnnnnnnnnnnnnnnnnnnnnnnnnnnnnnnnnnnnnnnnnnnnnnnnnnnnnnnnnnnnnnnnnnnnnnnnnnnnnnnnnnnnnnnnnnnnnnnnnnnnnnnnnnnnnnnnnnnnnnnnnnnnnnnnnnnnnnnnnnnnnnnnnnnnnnnnnnnnnnnnnnnnnnnnnnnnnnnnnnnnnnnnnnnnnnnnnnnnnnnnnnnnnnnnnnnnnnnnnnnnnnnnnnnnnnnnnnnnnnnnnnnnnnnnnnnnnnnnnnnnnnnnnnnnnnnnnnnnnnnnnnnnnnnnnnnnnnnnnnnnnnnnnnnnnnnnnnnnnnnnnnnnnnnnnnnnnnnnnnnnnnnnnnnnnnnnnnnnnnnnnnnnnnnnnnnnnnnnnnnnnnnnnnnnnnnnnnnnnnnnnnnnnnnnnnnnnnnnnnnnnnnnnnnnnnnnnnnnnnnnnnnnnnnnnnnnnnnnnnnnnnnnnnnnnnnnnnnnnnnnnnnnnnnnnnnnnnnnnnnnnnnnnnnnnnnnnnnnnnnnnnnnnnnnnnnnnnnnnnnnnnnnnnnnnnnnnnnnnnnnnnnnnnnnnnnnnnnnnnnnnnnnnnnnnnnnnnnnnnnnnnnnnnnnnnnnnnnnnnnnnnnnnnnnnnnnnnnnnnnnnnnnnnnnnnnnnnnnnnnnnnnnnnnnnnnnnnnnnnnnnnnnnnnnnnnnnnnnnnnnnnnnnnnnnnnnnnnnnnnnnnnnnnnnnnnnnnnnnnnnnnnnnnnnnnnnnnnnnnnnnnnnnnnnnnnnnnnnnnnnnnnnnnnnnnnnnnnnnnnnnnnnnnnnnnnnnnnnnnnnnnnnnnnnnnnnnnnnnnnnnnnnnnnnnnnnnnnnnnnnnnnnnnnnnnnnnnnnnnnnnnnnnnnnnnnnnnnnnnnnnnnnnnnnnnnnnnnnnnnnnnnnnnnnnnnnnnnnnnnnnnnnnnnnnnnnnnnnnnnnnnnnnnnnnnnnnnnnnnnnnnnnnnnnnnnnnnnnnnnnnnnnnnnnnnnnnnnnnnnnnnnnnnnnnnnnnnnnnnnnnnnnnnnnnnnnnnnnnnnnnnnnnnnnnnnnnnnnnnnnnnnnnnnnnnnnnnnnnnnnnnnnnnnnnnnnnnnnnnnnnnnnnnnnnnnnnnnnnnnnnnnnnnnnnnnnnnnnnnnnnnnnnnnnnnnnnnnnnnnnnnnnnnnnnnnnnnnnnnnnnnnnnnnnnnnnnnnnnnnnnnnnnnnnnnnnnnnnnnnnnnnnnnnnnnnnnnnnnnnnnnnnnnnnnnnnnnnnnnnnnnnnnnnnnnnnnnnnnnnnnnnnnnnnnnnnnnnnnnnnnnnnnnnnnnnnnnnnnnnnnnnnnnnnnnnnnnnnnnnnnnnnnnnnnnnnnnnnnnnnnnnnnnnnnnnnnnnnnnnnnnnnnnnnnnnnnnnnnnnnnnnnnnnnnnnnnnnnnnnnnnnnnnnnnnnnnnnnnnnnnnnnnnnnnnnnnnnnnnnnnnnnnnnnnnnnnnnnnnnnnnnnnnnnnnnnnnnnnnnnnnnnnnnnnnnnnnnnnnnnnnnnnnnnnnnnnnnnnnnnnnnnnnnnnnnnnnnnnnnnnnnnnnnnnnnnnnnnnnnnnnnnnnnnnnnnnnnnnnnnnnnnnnnnnnnnnnnnnnnnnnnnnnnnnnnnnnnnnnnnnnnnnnnnnnnnnnnnnnnnnnnnnnnnnnnnnnnnnnnnnnnnnnnnnnnnnnnnnnnnnnnnnnnnnnnnnnnnnnnnnnnnnnnnnnnnnnnnnnnnnnnnnnnnnnnnnnnnnnnnnnnnnnnnnnnnnnnnnnnnnnnnnnnnnnnnnnnnnnnnnnnnnnnnnnnnnnnnnnnnnnnnnnnnnnnnnnnnnnnnnnnnnnnnnnnnnnnnnnnnnnnnnnnnnnnnnnnnnnnnnnnnnnnnnnnnnnnnnnnnnnnnnnnnnnnnnnnnnnnnnnnnnnnnnnnnnnnnnnnnnnnnnnnnnnnnnnnnnnnnnnnnnnnnnnnnnnnnnnnnnnnnnnnnnnnnnnnnnnnnnnnnnnnnnnnnnnnnnnnnnnnnnnnnnnnnnnnnnnnnnnnnnnnnnnnnnnnnnnnnnnnnnnnnnnnnnnnnnnnnnnnnnnnnnnnnnnnnnnnnnnnnnnnnnnnnnnnnnnnnnnnnnnnnnnnnnnnnnnnnnnnnnnnnnnnnnnnnnnnnnnnnnnnnnnnnnnnnnnnnnnnnnnnnnnnnnnnnnnnnnnnnnnnnnnnnnnnnnnnnnnnnnnnnnnnnnnnnnnnnnnnnnnnnnnnnnnnnnnnnnnnnnnnnnnnnnnnnnnnnnnnnnnnnnnnnnnnnnnnnnnnnnnnnnnnnnnnnnnnnnnnnnnnnnnnnnnnnnnnnnnnnnnnnnnnnnnnnnnnnnnnnnnnnnnnnnnnnnnnnnnnnnnnnnnnnnnnnnnnnnnnnnnnnnnnnnnnnnnnnnnnnnnnnnnnnnnnnnnnnnnnnnnnnnnnnnnnnnnnnnnnnnnnnnnnnnnnnnnnnnnnnnnnnnnnnnnnnnnnnnnnnnnnnnnnnnnnnnnnnnnnnnnnnnnnnnnnnnnnnnnnnnnnnnnnnnnnnnnnnnnnnnnnnnnnnnnnnnnnnnnnnnnnnnnnnnnnnnnnnnnnnnnnnnnnnnnnnnnnnnnnnnnnnnnnnnnnnnnnnnnnnnnnnnnnnnnnnnnnnnnnnnnnnnnnnnnnnnnnnnnnnnnnnnnnnnnnnnnnnnnnnnnnnnnnnnnnnnnnnnnnnnnnnnnnnnnnnnnnnnnnnnnnnnnnnnnnnnnnnnnnnnnnnnnnnnnnnnnnnnnnnnnnnnnnnnnnnnnnnnnnnnnnnnnnnnnnnnnnnnnnnnnnnnnnnnnnnnnnnnnnnnnnnnnnnnnnnnnnnnnnnnnnnnnnnnnnnnnnnnnnnnnnnnnnnnnnnnnnnnnnnnnnnnnnnnnnnnnnnnnnnnnnnnnnnnnnnnnnnnnnnnnnnnnnnnnnnnnnnnnnnnnnnnnnnnnnnnnnnnnnnnnnnnnnnnnnnnnnnnnnnnnnnnnnnnnnnnnnnnnnnnnnnnnnnnnnnnnnnnnnnnnnnnnnnnnnnnnnnnnnnnnnnnnnnnnnnnnnnnnnnnnnnnnnnnnnnnnnnnnnnnnnnnnnnnnnnnnnnnnnnnnnnnnnnnnnnnnnnnnnnnnnnnnnnnnnnnnnnnnnnnnnnnnnnnnnnnnnnnnnnnnnnnnnnnnnnnnnnnnnnnnnnnnnnnnnnnnnnnnnnnnnnnnnnnnnnnnnnnnnnnnnnnnnnnnnnnnnnnnnnnnnnnnnnnnnnnnnnnnnnnnnnnnnnnnnnnnnnnnnnnnnnnnnnnnnnnnnnnnnnnnnnnnnnnnnnnnnnnnnnnnnnnnnnnnnnnnnnnnnnnnnnnnnnnnnnnnnnnnnnnnnnnnnnnnnnnnnnnnnnnnnnnnnnnnnnnnnnnnnnnnnnnnnnnnnnnnnnnnnnnnnnnnnnnnnnnnnnnnnnnnnnnnnnnnnnnnnnnnnnnnnnnnnnnnnnnnnnnnnnnnnnnnnnnnnnnnnnnnnnnnnnnnnnnnnnnnnnnnnnnnnnnnnnnnnnnnnnnnnnnnnnnnnnnnnnnnnnnnnnnnnnnnnnnnnnnnnnnnnnnnnnnnnnnnnnnnnnnnnnnnnnnnnnnnnnnnnnnnnnnnnnnnnnnnnnnnnnnnnnnnnnnnnnnnnnnnnnnnnnnnnnnnnnnnnnnnnnnnnnnnnnnnnnnnnnnnnnnnnnnnnnnnnnnnnnnnnnnnnnnnnnnnnnnnnnnnnnnnnnnnnnnnnnnnnnnnnnnnnnnnnnnnnnnnnnnnnnnnnnnnnnnnnnnnnnnnnnnnnnnnnnnnnnnnnnnnnnnnnnnnnnnnnnnnnnnnnnnnnnnnnnnnnnnnnnnnnnnnnnnnnnnnnnnnnnnnnnnnnnnnnnnnnnnnnnnnnnnnnnnnnnnnnnnnnnnnnnnnnnnnnnnnnnnnnnnnnnnnnnnnnnnnnnnnnnnnnnnnnnnnnnnnnnnnnnnnnnnnnnnnnnnnnnnnnnnnnnnnnnnnnnnnnnnnnnnnnnnnnnnnnnnnnnnnnnnnnnnnnnnnnnnnnnnnnnnnnnnnnnnnnnnnnnnnnnnnnnnnnnnnnnnnnnnnnnnnnnnnnnnnnnnnnnnnnnnnnnnnnnnnnnnnnnnnnnnnnnnnnnnnnnnnnnnnnnnnnnnnnnnnnnnnnnnnnnnnnnnnnnnnnnnnnnnnnnnnnnnnnnnnnnnnnnnnnnnnnnnnnnnnnnnnnnnnnnnnnnnnnnnnnnnnnnnnnnnnnnnnnnnnnnnnnnnnnnnnnnnnnnnnnnnnnnnnnnnnnnnnnnnnnnnnnnnnnnnnnnnnnnnnnnnnnnnnnnnnnnnnnnnnnnnnnnnnnnnnnnnnnnnnnnnnnnnnnnnnnnnnnnnnnnnnnnnnnnnnnnnnnnnnnnnnnnnnnnnnnnnnnnnnnnnnnnnnnnnnnnnnnnnnnnnnnnnnnnnnnnnnnnnnnnnnnnnnnnnnnnnnnnnnnnnnnnnnnnnnnnnnnnnnnnnnnnnnnnnnnnnnnnnnnnnnnnnnnnnnnnnnnnnnnnnnnnnnnnnnnnnnnnnnnnnnnnnnnnnnnnnnnnnnnnnnnnnnnnnnnnnnnnnnnnnnnnnnnnnnnnnnnnnnnnnnnnnnnnnnnnnnnnnnnnnnnnnnnnnnnnnnnnnnnnnnnnnnnnnnnnnnnnnnnnnnnnnnnnnnnnnnnnnnnnnnnnnnnnnnnnnnnnnnnnnnnnnnnnnnnnnnnnnnnnnnnnnnnnnnnnnnnnnnnnnnnnnnnnnnnnnnnnnnnnnnnnnnnnnnnnnnnnnnnnnnnnnnnnnnnnnnnnnnnnnnnnnnnnnnnnnnnnnnnnnnnnnnnnnnnnnnnnnnnnnnnnnnnnnnnnnnnnnnnnnnnnnnnnnnnnnnnnnnnnnnnnnnnnnnnnnnnnnnnnnnnnnnnnnnnnnnnnnnnnnnnnnnnnnnnnnnnnnnnnnnnnnnnnnnnnnnnnnnnnnnnnnnnnnnnnnnnnnnnnnnnnnnnnnnnnnnnnnnnnnnnnnnnnnnnnnnnnnnnnnnnnnnnnnnnnnnnnnnnnnnnnnnnnnnnnnnnnnnnnnnnnnnnnnnnnnnnnnnnnnnnnnnnnnnnnnnnnnnnnnnnnnnnnnnnnnnnnnnnnnnnnnnnnnnnnnnnnnnnnnnnnnnnnnnnnnnnnnnnnnnnnnnnnnnnnnnnnnnnnnnnnnnnnnnnnnnnnnnnnnnnnnnnnnnnnnnnnnnnnnnnnnnnnnnnnnnnnnnnnnnnnnnnnnnnnnnnnnnnnnnnnnnnnnnnnnnnnnnnnnnnnnnnnnnnnnnnnnnnnnnnnnnnnnnnnnnnnnnnnnnnnnnnnnnnnnnnnnnnnnnnnnnnnnnnnnnnnnnnnnnnnnnnnnnnnnnnnnnnnnnnnnnnnnnnnnnnnnnnnnnnnnnnnnnnnnnnnnnnnnnnnnnnnnnnnnnnnnnnnnnnnnnnnnnnnnnnnnnnnnnnnnnnnnnnnnnnnnnnnnnnnnnnnnnnnnnnnnnnnnnnnnnnnnnnnnnnnnnnnnnnnnnnnnnnnnnnnnnnnnnnnnnnnnnnnnnnnnnnnnnnnnnnnnnnnnnnnnnnnnnnnnnnnnnnnnnnnnnnnnnnnnnnnnnnnnnnnnnnnnnnnnnnnnnnnnnnnnnnnnnnnnnnnnnnnnnnnnnnnnnnnnnnnnnnnnnnnnnnnnnnnnnnnnnnnnnnnnnnnnnnnnnnnnnnnnnnnnnnnnnnnnnnnnnnnnnnnnnnnnnnnnnnnnnnnnnnnnnnnnnnnnnnnnnnnnnnnnnnnnnnnnnnnnnnnnnnnnnnnnnnnnnnnnnnnnnnnnnnnnnnnnnnnnnnnnnnnnnnnnnnnnnnnnnnnnnnnnnnnnnnnnnnnnnnnnnnnnnnnnnnnnnnnnnnnnnnnnnnnnnnnnnnnnnnnnnnnnnnnnnnnnnnnnnnnnnnnnnnnnnnnnnnnnnnnnnnnnnnnnnnnnnnnnnnnnnnnnnnnnnnnnnnnnnnnnnnnnnnnnnnnnnnnnnnnnnnnnnnnnnnnnnnnnnnnnnnnnnnnnnnnnnnnnnnnnnnnnnnnnnnnnnnnnnnnnnnnnnnnnnnnnnnnnnnnnnnnnnnnnnnnnnnnnnnnnnnnnnnnnnnnnnnnnnnnnnnnnnnnnnnnnnnnnnnnnnnnnnnnnnnnnnnnnnnnnnnnnnnnnnnnnnnnnnnnnnnnnnnnnnnnnnnnnnnnnnnnnnnnnnnnnnnnnnnnnnnnnnnnnnnnnnnnnnnnnnnnnnnnnnnnnnnnnnnnnnnnnnnnnnnnnnnnnnnnnnnnnnnnnnnnnnnnnnnnnnnnnnnnnnnnnnnnnnnnnnnnnnnnnnnnnnnnnnnnnnnnnnnnnnnnnnnnnnnnnnnnnnnnnnnnnnnnnnnnnnnnnnnnnnnnnnnnnnnnnnnnnnnnnnnnnnnnnnnnnnnnnnnnnnnnnnnnnnnnnnnnnnnnnnnnnnnnnnnnnnnnnnnnnnnnnnnnnnnnnnnnnnnnnnnnnnnnnnnnnnnnnnnnnnnnnnnnnnnnnnnnnnnnnnnnnnnnnnnnnnnnnnnnnnnnnnnnnnnnnnnnnnnnnnnnnnnnnnnnnnnnnnnnnnnnnnnnnnnnnnnnnnnnnnnnnnnnnnnnnnnnnnnnnnnnnnnnnnnnnnnnnnnnnnnnnnnnnnnnnnnnnnnnnnnnnnnnnnnnnnnnnnnnnnnnnnnnnnnnnnnnnnnnnnnnnnnnnnnnnnnnnnnnnnnnnnnnnnnnnnnnnnnnnnnnnnnnnnnnnnnnnnnnnnnnnnnnnnnnnnnnnnnnnnnnnnnnnnnnnnnnnnnnnnnnnnnnnnnnnnnnnnnnnnnnnnnnnnnnnnnnnnnnnnnnnnnnnnnnnnnnnnnnnnnnnnnnnnnnnnnnnnnnnnnnnnnnnnnnnnnnnnnnnnnnnnnnnnnnnnnnnnnnnnnnnnnnnnnnnnnnnnnnnnnnnnnnnnnnnnnnnnnnnnnnnnnnnnnnnnnnnnnnnnnnnnnnnnnnnnnnnnnnnnnnnnnnnnnnnnnnnnnnnnnnnnnnnnnnnnnnnnnnnnnnnnnnnnnnnnnnnnnnnnnnnnnnnnnnnnnnnnnnnnnnnnnnnnnnnnnnnnnnnnnnnnnnnnnnnnnnnnnnnnnnnnnnnnnnnnnnnnnnnnnnnnnnnnnnnnnnnnnnnnnnnnnnnnnnnnnnnnnnnnnnnnnnnnnnnnnnnnnnnnnnnnnnnnnnnnnnnnnnnnnnnnnnnnnnnnnnnnnnnnnnnnnnnnnnnnnnnnnnnnnnnnnnnnnnnnnnnnnnnnnnnnnnnnnnnnnnnnnnnnnnnnnnnnnnnnnnnnnnnnnnnnnnnnnnnnnnnnnnnnnnnnnnnnnnnnnnnnnnnnnnnnnnnnnnnnnnnnnnnnnnnnnnnnnnnnnnnnnnnnnnnnnnnnnnnnnnnnnnnnnnnnnnnnnnnnnnnnnnnnnnnnnnnnnnnnnnnnnnnnnnnnnnnnnnnnnnnnnnnnnnnnnnnnnnnnnnnnnnnnnnnnnnnnnnnnnnnnnnnnnnnnnnnnnnnnnnnnnnnnnnnnnnnnnnnnnnnnnnnnnnnnnnnnnnnnnnnnnnnnnnnnnnnnnnnnnnnnnnnnnnnnnnnnnnnnnnnnnnnnnnnnnnnnnnnnnnnnnnnnnnnnnnnnnnnnnnnnnnnnnnnnnnnnnnnnnnnnnnnnnnnnnnnnnnnnnnnnnnnnnnnnnnnnnnnnnnnnnnnnnnnnnnnnnnnnnnnnnnnnnnnnnnnnnnnnnnnnnnnnnnnnnnnnnnnnnnnnnnnnnnnnnnnnnnnnnnnnnnnnnnnnnnnnnnnnnnnnnnnnnnnnnnnnnnnnnnnnnnnnnnnnnnnnnnnnnnnnnnnnnnnnnnnnnnnnnnnnnnnnnnnnnnnnnnnnnnnnnnnnnnnnnnnnnnnnnnnnnnnnnnnnnnnnnnnnnnnnnnnnnnnnnnnnnnnnnnnnnnnnnnnnnnnnnnnnnnnnnnnnnnnnnnnnnnnnnnnnnnnnnnnnnnnnnnnnnnnnnnnnnnnnnnnnnnnnnnnnnnnnnnnnnnnnnnnnnnnnnnnnnnnnnnnnnnnnnnnnnnnnnnnnnnnnnnnnnnnnnnnnnnnnnnnnnnnnnnnnnnnnnnnnnnnnnnnnnnnnnnnnnnnnnnnnnnnnnnnnnnnnnnnnnnnnnnnnnnnnnnnnnnnnnnnnnnnnnnnnnnnnnnnnnnnnnnnnnnnnnnnnnnnnnnnnnnnnnnnnnnnnnnnnnnnnnnnnnnnnnnnnnnnnnnnnnnnnnnnnnnnnnnnnnnnnnnnnnnnnnnnnnnnnnnnnnnnnnnnnnnnnnnnnnnnnnnnnnnnnnnnnnnnnnnnnnnnnnnnnnnnnnnnnnnnnnnnnnnnnnnnnnnnnnnnnnnnnnnnnnnnnnnnnnnnnnnnnnnnnnnnnnnnnnnnnnnnnnnnnnnnnnnnnnnnnnnnnnnnnnnnnnnnnnnnnnnnnnnnnnnnnnnnnnnnnnnnnnnnnnnnnnnnnnnnnnnnnnnnnnnnnnnnnnnnnnnnnnnnnnnnnnnnnnnnnnnnnnnnnnnnnnnnnnnnnnnnnnnnnnnnnnnnnnnnnnnnnnnnnnnnnnnnnnnnnnnnnnnnnnnnnnnnnnnnnnnnnnnnnnnnnnnnnnnnnnnnnnnnnnnnnnnnnnnnnnnnnnnnnnnnnnnnnnnnnnnnnnnnnnnnnnnnnnnnnnnnnnnnnnnnnnnnnnnnnnnnnnnnnnnnnnnnnnnnnnnnnnnnnnnnnnnnnnnnnnnnnnnnnnnnnnnnnnnnnnnnnnnnnnnnnnnnnnnnnnnnnnnnnnnnnnnnnnnnnnnnnnnnnnnnnnnnnnnnnnnnnnnnnnnnnnnnnnnnnnnnnnnnnnnnnnnnnnnnnnnnnnnnnnnnnnnnnnnnnnnnnnnnnnnnnnnnnnnnnnnnnnnnnnnnnnnnnnnnnnnnnnnnnnnnnnnnnnnnnnnnnnnnnnnnnnnnnnnnnnnnnnnnnnnnnnnnnnnnnnnnnnnnnnnnnnnnnnnnnnnnnnnnnnnnnnnnnnnnnnnnnnnnnnnnnnnnnnnnnnnnnnnnnnnnnnnnnnnnnnnnnnnnnnnnnnnnnnnnnnnnnnnnnnnnnnnnnnnnnnnnnnnnnnnnnnnnnnnnnnnnnnnnnnnnnnnnnnnnnnnnnnnnnnnnnnnnnnnnnnnnnnnnnnnnnnnnnnnnnnnnnnnnnnnnnnnnnnnnnnnnnnnnnnnnnnnnnnnnnnnnnnnnnnnnnnnnnnnnnnnnnnnnnnnnnnnnnnnnnnnnnnnnnnnnnnnnnnnnnnnnnnnnnnnnnnnnnnnnnnnnnnnnnnnnnnnnnnnnnnnnnnnnnnnnnnnnnnnnnnnnnnnnnnnnnnnnnnnnnnnnnnnnnnnnnnnnnnnnnnnnnnnnnnnnnnnnnnnnnnnnnnnnnnnnnnnnnnnnnnnnnnnnnnnnnnnnnnnnnnnnnnnnnnnnnnnnnnnnnnnnnnnnnnnnnnnnnnnnnnnnnnnnnnnnnnnnnnnnnnnnnnnnnnnnnnnnnnnnnnnnnnnnnnnnnnnnnnnnnnnnnnnnnnnnnnnnnnnnnnnnnnnnnnnnnnnnnnnnnnnnnnnnnnnnnnnnnnnnnnnnnnnnnnnnnnnnnnnnnnnnnnnnnnnnnnnnnnnnnnnnnnnnnnnnnnnnnnnnnnnnnnnnnnnnnnnnnnnnnnnnnnnnnnnnnnnnnnnnnnnnnnnnnnnnnnnnnnnnnnnnnnnnnnnnnnnnnnnnnnnnnnnnnnnnnnnnnnnnnnnnnnnnnnnnnnnnnnnnnnnnnnnnnnnnnnnnnnnnnnnnnnnnnnnnnnnnnnnnnnnnnnnnnnnnnnnnnnnnnnnnnnnnnnnnnnnnnnnnnnnnnnnnnnnnnnnnnnnnnnnnnnnnnnnnnnnnnnnnnnnnnnnnnnnnnnnnnnnnnnnnnnnnnnnnnnnnnnnnnnnnnnnnnnnnnnnnnnnnnnnnnnnnnnnnnnnnnnnnnnnnnnnnnnnnnnnnnnnnnnnnnnnnnnnnnnnnnnnnnnnnnnnnnnnnnnnnnnnnnnnnnnnnnnnnnnnnnnnnnnnnnnnnnnnnnnnnnnnnnnnnnnnnnnnnnnnnnnnnnnnnnnnnnnnnnnnnnnnnnnnnnnnnnnnnnnnnnnnnnnnnnnnnnnnnnnnnnnnnnnnnnnnnnnnnnnnnnnnnnnnnnnnnnnnnnnnnnnnnnnnnnnnnnnnnnnnnnnnnnnnnnnnnnnnnnnnnnnnnnnnnnnnnnnnnnnnnnnnnnnnnnnnnnnnnnnnnnnnnnnnnnnnnnnnnnnnnnnnnnnnnnnnnnnnnnnnnnnnnnnnnnnnnnnnnnnnnnnnnnnnnnnnnnnnnnnnnnnnnnnnnnnnnnnnnnnnnnnnnnnnnnnnnnnnnnnnnnnnnnnnnnnnnnnnnnnnnnnnnnnnnnnnnnnnnnnnnnnnnnnnnnnnnnnnnnnnnnnnnnnnnnnnnnnnnnnnnnnnnnnnnnnnnnnnnnnnnnnnnnnnnnnnnnnnnnnnnnnnnnnnnnnnnnnnnnnnnnnnnnnnnnnnnnnnnnnnnnnnnnnnnnnnnnnnnnnnnnnnnnnnnnnnnnnnnnnnnnnnnnnnnnnnnnnnnnnnnnnnnnnnnnnnnnnnnnnnnnnnnnnnnnnnnnnnnnnnnnnnnnnnnnnnnnnnnnnnnnnnnnnnnnnnnnnnnnnnnnnnnnnnnnnnnnnnnnnnnnnnnnnnnnnnnnnnnnnnnnnnnnnnnnnnnnnnnnnnnnnnnnnnnnnnnnnnnnnnnnnnnnnnnnnnnnnnnnnnnnnnnnnnnnnnnnnnnnnnnnnnnnnnnnnnnnnnnnnnnnnnnnnnnnnnnnnnnnnnnnnnnnnnnnnnnnnnnnnnnnnnnnnnnnnnnnnnnnnnnnnnnnnnnnnnnnnnnnnnnnnnnnnnnnnnnnnnnnnnnnnnnnnnnnnnnnnnnnnnnnnnnnnnnnnnnnnnnnnnnnnnnnnnnnnnnnnnnnnnnnnnnnnnnnnnnnnnnnnnnnnnnnnnnnnnnnnnnnnnnnnnnnnnnnnnnnnnnnnnnnnnnnnnnnnnnnnnnnnnnnnnnnnnnnnnnnnnnnnnnnnnnnnnnnnnnnnnnnnnnnnnnnnnnnnnnnnnnnnnnnnnnnnnnnnnnnnnnnnnnnnnnnnnnnnnnnnnnnnnnnnnnnnnnnnnnnnnnnnnnnnnnnnnnnnnnnnnnnnnnnnnnnnnnnnnnnnnnnnnnnnnnnnnnnnnnnnnnnnnnnnnnnnnnnnnnnnnnnnnnnnnnnnnnnnnnnnnnnnnnnnnnnnnnnnnnnnnnnnnnnnnnnnnnnnnnnnnnnnnnnnnnnnnnnnnnnnnnnnnnnnnnnnnnnnnnnnnnnnnnnnnnnnnnnnnnnnnnnnnnnnnnnnnnnnnnnnnnnnnnnnnnnnnnnnnnnnnnnnnnnnnnnnnnnnnnnnnnnnnnnnnnnnnnnnnnnnnnnnnnnnnnnnnnnnnnnnnnnnnnnnnnnnnnnnnnnnnnnnnnnnnnnnnnnnnnnnnnnnnnnnnnnnnnnnnnnnnnnnnnnnnnnnnnnnnnnnnnnnnnnnnnnnnnnnnnnnnnnnnnnnnnnnnnnnnnnnnnnnnnnnnnnnnnnnnnnnnnnnnnnnnnnnnnnnnnnnnnnnnnnnnnnnnnnnnnnnnnnnnnnnnnnnnnnnnnnnnnnnnnnnnnnnnnnnnnnnnnnnnnnnnnnnnnnnnnnnnnnnnnnnnnnnnnnnnnnnnnnnnnnnnnnnnnnnnnnnnnnnnnnnnnnnnnnnnnnnnnnnnnnnnnnnnnnnnnnnnnnnnnnnnnnnnnnnnnnnnnnnnnnnnnnnnnnnnnnnnnnnnnnnnnnnnnnnnnnnnnnnnnnnnnnnnnnnnnnnnnnnnnnnnnnnnnnnnnnnnnnnnnnnnnnnnnnnnnnnnnnnnnnnnnnnnnnnnnnnnnnnnnnnnnnnnnnnnnnnnnnnnnnnnnnnnnnnnnnnnnnnnnnnnnnnnnnnnnnnnnnnnnnnnnnnnnnnnnnnnnnnnnnnnnnnnnnnnnnnnnnnnnnnnnnnnnnnnnnnnnnnnnnnnnnnnnnnnnnnnnnnnnnnnnnnnnnnnnnnnnnnnnnnnnnnnnnnnnnnnnnnnnnnnnnnnnnnnnnnnnnnnnnnnnnnnnnnnnnnnnnnnnnnnnnnnnnnnnnnnnnnnnnnnnnnnnnnnnnnnnnnnnnnnnnnnnnnnnnnnnnnnnnnnnnnnnnnnnnnnnnnnnnnnnnnnnnnnnnnnnnnnnnnnnnnnnnnnnnnnnnnnnnnnnnnnnnnnnnnnnnnnnnnnnnnnnnnnnnnnnnnnnnnnnnnnnnnnnnnnnnnnnnnnnnnnnnnnnnnnnnnnnnnnnnnnnnnnnnnnnnnnnnnnnnnnnnnnnnnnnnnnnnnnnnnnnnnnnnnnnnnnnnnnnnnnnnnnnnnnnnnnnnnnnnnnnnnnnnnnnnnnnnnnnnnnnnnnnnnnnnnnnnnnnnnnnnnnnnnnnnnnnnnnnnnnnnnnnnnnnnnnnnnnnnnnnnnnnnnnnnnnnnnnnnnnnnnnnnnnnnnnnnnnnnnnnnnnnnnnnnnnnnnnnnnnnnnnnnnnnnnnnnnnnnnnnnnnnnnnnnnnnnnnnnnnnnnnnnnnnnnnnnnnnnnnnnnnnnnnnnnnnnnnnnnnnnnnnnnnnnnnnnnnnnnnnnnnnnnnnnnnnnnnnnnnnnnnnnnnnnnnnnnnnnnnnnnnnnnnnnnnnnnnnnnnnnnnnnnnnnnnnnnnnnnnnnnnnnnnnnnnnnnnnnnnnnnnnnnnnnnnnnnnnnnnnnnnnnnnnnnnnnnnnnnnnnnnnnnnnnnnnnnnnnnnnnnnnnnnnnnnnnnnnnnnnnnnnnnnnnnnnnnnnnnnnnnnnnnnnnnnnnnnnnnnnnnnnnnnnnnnnnnnnnnnnnnnnnnnnnnnnnnnnnnnnnnnnnnnnnnnnnnnnnnnnnnnnnnnnnnnnnnnnnnnnnnnnnnnnnnnnnnnnnnnnnnnnnnnnnnnnnnnnnnnnnnnnnnnnnnnnnnnnnnnnnnnnnnnnnnnnnnnnnnnnnnnnnnnnnnnnnnnnnnnnnnnnnnnnnnnnnnnnnnnnnnnnnnnnnnnnnnnnnnnnnnnnnnnnnnnnnnnnnnnnnnnnnnnnnnnnnnnnnnnnnnnnnnnnnnnnnnnnnnnnnnnnnnnnnnnnnnnnnnnnnnnnnnnnnnnnnnnnnnnnnnnnnnnnnnnnnnnnnnnnnnnnnnnnnnnnnnnnnnnnnnnnnnnnnnnnnnnnnnnnnnnnnnnnnnnnnnnnnnnnnnnnnnnnnnnnnnnnnnnnnnnnnnnnnnnnnnnnnnnnnnnnnnnnnnnnnnnnnnnnnnnnnnnnnnnnnnnnnnnnnnnnnnnnnnnnnnnnnnnnnnnnnnnnnnnnnnnnnnnnnnnnnnnnnnnnnnnnnnnnnnnnnnnnnnnnnnnnnnnnnnnnnnnnnnnnnnnnnnnnnnnnnnnnnnnnnnnnnnnnnnnnnnnnnnnnnnnnnnnnnnnnnnnnnnnnnnnnnnnnnnnnnnnnnnnnnnnnnnnnnnnnnnnnnnnnnnnnnnnnnnnnnnnnnnnnnnnnnnnnnnnnnnnnnnnnnnnnnnnnnnnnnnnnnnnnnnnnnnnnnnnnnnnnnnnnnnnnnnnnnnnnnnnnnnnnnnnnnnnnnnnnnnnnnnnnnnnnnnnnnnnnnnnnnnnnnnnnnnnnnnnnnnnnnnnnnnnnnnnnnnnnnnnnnnnnnnnnnnnnnnnnnnnnnnnnnnnnnnnnnnnnnnnnnnnnnnnnnnnnnnnnnnnnnnnnnnnnnnnnnnnnnnnnnnnnnnnnnnnnnnnnnnnnnnnnnnnnnnnnnnnnnnnnnnnnnnnnnnnnnnnnnnnnnnnnnnnnnnnnnnnnnnnnnnnnnnnnnnnnnnnnnnnnnnnnnnnnnnnnnnnnnnnnnnnnnnnnnnnnnnnnnnnnnnnnnnnnnnnnnnnnnnnnnnnnnnnnnnnnnnnnnnnnnnnnnnnnnnnnnnnnnnnnnnnnnnnnnnnnnnnnnnnnnnnnnnnnnnnnnnnnnnnnnnnnnnnnnnnnnnnnnnnnnnnnnnnnnnnnnnnnnnnnnnnnnnnnnnnnnnnnnnnnnnnnnnnnnnnnnnnnnnnnnnnnnnnnnnnnnnnnnnnnnnnnnnnnnnnnnnnnnnnnnnnnnnnnnnnnnnnnnnnnnnnnnnnnnnnnnnnnnnnnnnnnnnnnnnnnnnnnnnnnnnnnnnnnnnnnnnnnnnnnnnnnnnnnnnnnnnnnnnnnnnnnnnnnnnnnnnnnnnnnnnnnnnnnnnnnnnnnnnnnnnnnnnnnnnnnnnnnnnnnnnnnnnnnnnnnnnnnnnnnnnnnnnnnnnnnnnnnnnnnnnnnnnnnnnnnnnnnnnnnnnnnnnnnnnnnnnnnnnnnnnnnnnnnnnnnnnnnnnnnnnnnnnnnnnnnnnnnnnnnnnnnnnnnnnnnnnnnnnnnnnnnnnnnnnnnnnnnnnnnnnnnnnnnnnnnnnnnnnnnnnnnnnnnnnnnnnnnnnnnnnnnnnnnnnnnnnnnnnnnnnnnnnnnnnnnnnnnnnnnnnnnnnnnnnnnnnnnnnnnnnnnnnnnnnnnnnnnnnnnnnnnnnnnnnnnnnnnnnnnnnnnnnnnnnnnnnnnnnnnnnnnnnnnnnnnnnnnnnnnnnnnnnnnnnnnnnnnnnnnnnnnnnnnnnnnnnnnnnnnnnnnnnnnnnnnnnnnnnnnnnnnnnnnnnnnnnnnnnnnnnnnnnnnnnnnnnnnnnnnnnnnnnnnnnnnnnnnnnnnnnnnnnnnnnnnnnnnnnnnnnnnnnnnnnnnnnnnnnnnnnnnnnnnnnnnnnnnnnnnnnnnnnnnnnnnnnnnnnnnnnnnnnnnnnnnnnnnnnnnnnnnnnnnnnnnnnnnnnnnnnnnnnnnnnnnnnnnnnnnnnnnnnnnnnnnnnnnnnnnnnnnnnnnnnnnnnnnnnnnnnnnnnnnnnnnnnnnnnnnnnnnnnnnnnnnnnnnnnnnnnnnnnnnnnnnnnnnnnnnnnnnnnnnnnnnnnnnnnnnnnnnnnnnnnnnnnnnnnnnnnnnnnnnnnnnnnnnnnnnnnnnnnnnnnnnnnnnnnnnnnnnnnnnnnnnnnnnnnnnnnnnnnnnnnnnnnnnnnnnnnnnnnnnnnnnnnnnnnnnnnnnnnnnnnnnnnnnnnnnnnnnnnnnnnnnnnnnnnnnnnnnnnnnnnnnnnnnnnnnnnnnnnnnnnnnnnnnnnnnnnnnnnnnnnnnnnnnnnnnnnnnnnnnnnnnnnnnnnnnnnnnnnnnnnnnnnnnnnnnnnnnnnnnnnnnnnnnnnnnnnnnnnnnnnnnnnnnnnnnnnnnnnnnnnnnnnnnnnnnnnnnnnnnnnnnnnnnnnnnnnnnnnnnnnnnnnnnnnnnnnnnnnnnnnnnnnnnnnnnnnnnnnnnnnnnnnnnnnnnnnnnnnnnnnnnnnnnnnnnnnnnnnnnnnnnnnnnnnnnnnnnnnnnnnnnnnnnnnnnnnnnnnnnnnnnnnnnnnnnnnnnnnnnnnnnnnnnnnnnnnnnnnnnnnnnnnnnnnnnnnnnnnnnnnnnnnnnnnnnnnnnnnnnnnnnnnnnnnnnnnnnnnnnnnnnnnnnnnnnnnnnnnnnnnnnnnnnnnnnnnnnnnnnnnnnnnnnnnnnnnnnnnnnnnnnnnnnnnnnnnnnnnnnnnnnnnnnnnnnnnnnnnnnnnnnnnnnnnnnnnnnnnnnnnnnnnnnnnnnnnnnnnnnnnnnnnnnnnnnnnnnnnnnnnnnnnnnnnnnnnnnnnnnnnnnnnnnnnnnnnnnnnnnnnnnnnnnnnnnnnnnnnnnnnnnnnnnnnnnnnnnnnnnnnnnnnnnnnnnnnnnnnnnnnnnnnnnnnnnnnnnnnnnnnnnnnnnnnnnnnnnnnnnnnnnnnnnnnnnnnnnnnnnnnnnnnnnnnnnnnnnnnnnnnnnnnnnnnnnnnnnnnnnnnnnnnnnnnnnnnnnnnnnnnnnnnnnnnnnnnnnnnnnnnnnnnnnnnnnnnnnnnnnnnnnnnnnnnnnnnnnnnnnnnnnnnnnnnnnnnnnnnnnnnnnnnnnnnnnnnnnnnnnnnnnnnnnnnnnnnnnnnnnnnnnnnnnnnnnnnnnnnnnnnnnnnnnnnnnnnnnnnnnnnnnnnnnnnnnnnnnnnnnnnnnnnnnnnnnnnnnnnnnnnnnnnnnnnnnnnnnnnnnnnnnnnnnnnnnnnnnnnnnnnnnnnnnnnnnnnnnnnnnnnnnnnnnnnnnnnnnnnnnnnnnnnnnnnnnnnnnnnnnnnnnnnnnnnnnnnnnnnnnnnnnnnnnnnnnnnnnnnnnnnnnnnnnnnnnnnnnnnnnnnnnnnnnnnnnnnnnnnnnnnnnnnnnnnnnnnnnnnnnnnnnnnnnnnnnnnnnnnnnnnnnnnnnnnnnnnnnnnnnnnnnnnnnnnnnnnnnnnnnnnnnnnnnnnnnnnnnnnnnnnnnnnnnnnnnnnnnnnnnnnnnnnnnnnnnnnnnnnnnnnnnnnnnnnnnnnnnnnnnnnnnnnnnnnnnnnnnnnnnnnnnnnnnnnnnnnnnnnnnnnnnnnnnnnnnnnnnnnnnnnnnnnnnnnnnnnnnnnnnnnnnnnnnnnnnnnnnnnnnnnnnnnnnnnnnnnnnnnnnnnnnnnnnnnnnnnnnnnnnnnnnnnnnnnnnnnnnnnnnnnnnnnnnnnnnnnnnnnnnnnnnnnnnnnnnnnnnnnnnnnnnnnnnnnnnnnnnnnnnnnnnnnnnnnnnnnnnnnnnnnnnnnnnnnnnnnnnnnnnnnnnnnnnnnnnnnnnnnnnnnnnnnnnnnnnnnnnnnnnnnnnnnnnnnnnnnnnnnnnnnnnnnnnnnnnnnnnnnnnnnnnnnnnnnnnnnnnnnnnnnnnnnnnnnnnnnnnnnnnnnnnnnnnnnnnnnnnnnnnnnnnnnnnnnnnnnnnnnnnnnnnnnnnnnnnnnnnnnnnnnnnnnnnnnnnnnnnnnnnnnnnnnnnnnnnnnnnnnnnnnnnnnnnnnnnnnnnnnnnnnnnnnnnnnnnnnnnnnnnnnnnnnnnnnnnnnnnnnnnnnnnnnnnnnnnnnnnnnnnnnnnnnnnnnnnnnnnnnnnnnnnnnnnnnnnnnnnnnnnnnnnnnnnnnnnnnnnnnnnnnnnnnnnnnnnnnnnnnnnnnnnnnnnnnnnnnnnnnnnnnnnnnnnnnnnnnnnnnnnnnnnnnnnnnnnnnnnnnnnnnnnnnnnnnnnnnnnnnnnnnnnnnnnnnnnnnnnnnnnnnnnnnnnnnnnnnnnnnnnnnnnnnnnnnnnnnnnnnnnnnnnnnnnnnnnnnnnnnnnnnnnnnnnnnnnnnnnnnnnnnnnnnnnnnnnnnnnnnnnnnnnnnnnnnnnnnnnnnnnnnnnnnnnnnnnnnnnnnnnnnnnnnnnnnnnnnnnnnnnnnnnnnnnnnnnnnnnnnnnnnnnnnnnnnnnnnnnnnnnnnnnnnnnnnnnnnnnnnnnnnnnnnnnnnnnnnnnnnnnnnnnnnnnnnnnnnnnnnnnnnnnnnnnnnnnnnnnnnnnnnnnnnnnnnnnnnnnnnnnnnnnnnnnnnnnnnnnnnnnnnnnnnnnnnnnnnnnnnnnnnnnnnnnnnnnnnnnnnnnnnnnnnnnnnnnnnnnnnnnnnnnnnnnnnnnnnnnnnnnnnnnnnnnnnnnnnnnnnnnnnnnnnnnnnnnnnnnnnnnnnnnnnnnnnnnnnnnnnnnnnnnnnnnnnnnnnnnnnnnnnnnnnnnnnnnnnnnnnnnnnnnnnnnnnnnnnnnnnnnnnnnnnnnnnnnnnnnnnnnnnnnnnnnnnnnnnnnnnnnnnnnnnnnnnnnnnnnnnnnnnnnnnnnnnnnnnnnnnnnnnnnnnnnnnnnnnnnnnnnnnnnnnnnnnnnnnnnnnnnnnnnnnnnnnnnnnnnnnnnnnnnnnnnnnnnnnnnnnnnnnnnnnnnnnnnnnnnnnnnnnnnnnnnnnnnnnnnnnnnnnnnnnnnnnnnnnnnnnnnnnnnnnnnnnnnnnnnnnnnnnnnnnnnnnnnnnnnnnnnnnnnnnnnnnnnnnnnnnnnnnnnnnnnnnnnnnnnnnnnnnnnnnnnnnnnnnnnnnnnnnnnnnnnnnnnnnnnnnnnnnnnnnnnnnnnnnnnnnnnnnnnnnnnnnnnnnnnnnnnnnnnnnnnnnnnnnnnnnnnnnnnnnnnnnnnnnnnnnnnnnnnnnnnnnnnnnnnnnnnnnnnnnnnnnnnnnnnnnnnnnnnnnnnnnnnnnnnnnnnnnnnnnnnnnnnnnnnnnnnnnnnnnnnnnnnnnnnnnnnnnnnnnnnnnnnnnnnnnnnnnnnnnnnnnnnnnnnnnnnnnnnnnnnnnnnnnnnnnnnnnnnnnnnnnnnnnnnnnnnnnnnnnnnnnnnnnnnnnnnnnnnnnnnnnnnnnnnnnnnnnnnnnnnnnnnnnnnnnnnnnnnnnnnnnnnnnnnnnnnnnnnnnnnnnnnnnnnnnnnnnnnnnnnnnnnnnnnnnnnnnnnnnnnnnnnnnnnnnnnnnnnnnnnnnnnnnnnnnnnnnnnnnnnnnnnnnnnnnnnnnnnnnnnnnnnnnnnnnnnnnnnnnnnnnnnnnnnnnnnnnnnnnnnnnnnnnnnnnnnnnnnnnnnnnnnnnnnnnnnnnnnnnnnnnnnnnnnnnnnnnnnnnnnnnnnnnnnnnnnnnnnnnnnnnnnnnnnnnnnnnnnnnnnnnnnnnnnnnnnnnnnnnnnnnnnnnnnnnnnnnnnnnnnnnnnnnnnnnnnnnnnnnnnnnnnnnnnnnnnnnnnnnnnnnnnnnnnnnnnnnnnnnnnnnnnnnnnnnnnnnnnnnnnnnnnnnnnnnnnnnnnnnnnnnnnnnnnnnnnnnnnnnnnnnnnnnnnnnnnnnnnnnnnnnnnnnnnnnnnnnnnnnnnnnnnnnnnnnnnnnnnnnnnnnnnnnnnnnnnnnnnnnnnnnnnnnnnnnnnnnnnnnnnnnnnnnnnnnnnnnnnnnnnnnnnnnnnnnnnnnnnnnnnnnnnnnnnnnnnnnnnnnnnnnnnnnnnnnnnnnnnnnnnnnnnnnnnnnnnnnnnnnnnnnnnnnnnnnnnnnnnnnnnnnnnnnnnnnnnnnnnnnnnnnnnnnnnnnnnnnnnnnnnnnnnnnnnnnnnnnnnnnnnnnnnnnnnnnnnnnnnnnnnnnnnnnnnnnnnnnnnnnnnnnnnnnnnnnnnnnnnnnnnnnnnnnnnnnnnnnnnnnnnnnnnnnnnnnnnnnnnnnnnnnnnnnnnnnnnnnnnnnnnnnnnnnnnnnnnnnnnnnnnnnnnnnnnnnnnnnnnnnnnnnnnnnnnnnnnnnnnnnnnnnnnnnnnnnnnnnnnnnnnnnnnnnnnnnnnnnnnnnnnnnnnnnnnnnnnnnnnnnnnnnnnnnnnnnnnnnnnnnnnnnnnnnnnnnnnnnnnnnnnnnnnnnnnnnnnnnnnnnnnnnnnnnnnnnnnnnnnnnnnnnnnnnnnnnnnnnnnnnnnnnnnnnnnnnnnnnnnnnnnnnnnnnnnnnnnnnnnnnnnnnnnnnnnnnnnnnnnnnnnnnnnnnnnnnnnnnnnnnnnnnnnnnnnnnnnnnnnnnnnnnnnnnnnnnnnnnnnnnnnnnnnnnnnnnnnnnnnnnnnnnnnnnnnnnnnnnnnnnnnnnnnnnnnnnnnnnnnnnnnnnnnnnnnnnnnnnnnnnnnnnnnnnnnnnnnnnnnnnnnnnnnnnnnnnnnnnnnnnnnnnnnnnnnnnnnnnnnnnnnnnnnnnnnnnnnnnnnnnnnnnnnnnnnnnnnnnnnnnnnnnnnnnnnnnnnnnnnnnnnnnnnnnnnnnnnnnnnnnnnnnnnnnnnnnnnnnnnnnnnnnnnnnnnnnnnnnnnnnnnnnnnnnnnnnnnnnnnnnnnnnnnnnnnnnnnnnnnnnnnnnnnnnnnnnnnnnnnnnnnnnnnnnnnnnnnnnnnnnnnnnnnnnnnnnnnnnnnnnnnnnnnnnnnnnnnnnnnnnnnnnnnnnnnnnnnnnnnnnnnnnnnnnnnnnnnnnnnnnnnnnnnnnnnnnnnnnnnnnnnnnnnnnnnnnnnnnnnnnnnnnnnnnnnnnnnnnnnnnnnnnnnnnnnnnnnnnnnnnnnnnnnnnnnnnnnnnnnnnnnnnnnnnnnnnnnnnnnnnnnnnnnnnnnnnnnnnnnnnnnnnnnnnnnnnnnnnnnnnnnnnnnnnnnnnnnnnnnnnnnnnnnnnnnnnnnnnnnnnnnnnnnnnnnnnnnnnnnnnnnnnnnnnnnnnnnnnnnnnnnnnnnnnnnnnnnnnnnnnnnnnnnnnnnnnnnnnnnnnnnnnnnnnnnnnnnnnnnnnnnnnnnnnnnnnnnnnnnnnnnnnnnnnnnnnnnnnnnnnnnnnnnnnnnnnnnnnnnnnnnnnnnnnnnnnnnnnnnnnnnnnnnnnnnnnnnnnnnnnnnnnnnnnnnnnnnnnnnnnnnnnnnnnnnnnnnnnnnnnnnnnnnnnnnnnnnnnnnnnnnnnnnnnnnnnnnnnnnnnnnnnnnnnnnnnnnnnnnnnnnnnnnnnnnnnnnnnnnnnnnnnnnnnnnnnnnnnnnnnnnnnnnnnnnnnnnnnnnnnnnnnnnnnnnnnnnnnnnnnnnnnnnnnnnnnnnnnnnnnnnnnnnnnnnnnnnnnnnnnnnnnnnnnnnnnnnnnnnnnnnnnnnnnnnnnnnnnnnnnnnnnnnnnnnnnnnnnnnnnnnnnnnnnnnnnnnnnnnnnnnnnnnnnnnnnnnnnnnnnnnnnnnnnnnnnnnnnnnnnnnnnnnnnnnnnnnnnnnnnnnnnnnnnnnnnnnnnnnnnnnnnnnnnnnnnnnnnnnnnnnnnnnnnnnnnnnnnnnnnnnnnnnnnnnnnnnnnnnnnnnnnnnnnnnnnnnnnnnnnnnnnnnnnnnnnnnnnnnnnnnnnnnnnnnnnnnnnnnnnnnnnnnnnnnnnnnnnnnnnnnnnnnnnnnnnnnnnnnnnnnnnnnnnnnnnnnnnnnnnnnnnnnnnnnnnnnnnnnnnnnnnnnnnnnnnnnnnnnnnnnnnnnnnnnnnnnnnnnnnnnnnnnnnnnnnnnnnnnnnnnnnnnnnnnnnnnnnnnnnnnnnnnnnnnnnnnnnnnnnnnnnnnnnnnnnnnnnnnnnnnnnnnnnnnnnnnnnnnnnnnnnnnnnnnnnnnnnnnnnnnnnnnnnnnnnnnnnnnnnnnnnnnnnnnnnnnnnnnnnnnnnnnnnnnnnnnnnnnnnnnnnnnnnnnnnnnnnnnnnnnnnnnnnnnnnnnnnnnnnnnnnnnnnnnnnnnnnnnnnnnnnnnnnnnnnnnnnnnnnnnnnnnnnnnnnnnnnnnnnnnnnnnnnnnnnnnnnnnnnnnnnnnnnnnnnnnnnnnnnnnnnnnnnnnnnnnnnnnnnnnnnnnnnnnnnnnnnnnnnnnnnnnnnnnnnnnnnnnnnnnnnnnnnnnnnnnnnnnnnnnnnnnnnnnnnnnnnnnnnnnnnnnnnnnnnnnnnnnnnnnnnnnnnnnnnnnnnnnnnnnnnnnnnnnnnnnnnnnnnnnnnnnnnnnnnnnnnnnnnnnnnnnnnnnnnnnnnnnnnnnnnnnnnnnnnnnnnnnnnnnnnnnnnnnnnnnnnnnnnnnnnnnnnnnnnnnnnnnnnnnnnnnnnnnnnnnnnnnnnnnnnnnnnnnnnnnnnnnnnnnnnnnnnnnnnnnnnnnnnnnnnnnnnnnnnnnnnnnnnnnnnnnnnnnnnnnnnnnnnnnnnnnnnnnnnnnnnnnnnnnnnnnnnnnnnnnnnnnnnnnnnnnnnnnnnnnnnnnnnnnnnnnnnnnnnnnnnnnnnnnnnnnnnnnnnnnnnnnnnnnnnnnnnnnnnnnnnnnnnnnnnnnnnnnnnnnnnnnnnnnnnnnnnnnnnnnnnnnnnnnnnnnnnnnnnnnnnnnnnnnnnnnnnnnnnnnnnnnnnnnnnnnnnnnnnnnnnnnnnnnnnnnnnnnnnnnnnnnnnnnnnnnnnnnnnnnnnnnnnnnnnnnnnnnnnnnnnnnnnnnnnnnnnnnnnnnnnnnnnnnnnnnnnnnnnnnnnnnnnnnnnnnnnnnnnnnnnnnnnnnnnnnnnnnnnnnnnnnnnnnnnnnnnnnnnnnnnnnnnnnnnnnnnnnnnnnnnnnnnnnnnnnnnnnnnnnnnnnnnnnnnnnnnnnnnnnnnnnnnnnnnnnnnnnnnnnnnnnnnnnnnnnnnnnnnnnnnnnnnnnnnnnnnnnnnnnnnnnnnnnnnnnnnnnnnnnnnnnnnnnnnnnnnnnnnnnnnnnnnnnnnnnnnnnnnnnnnnnnnnnnnnnnnnnnnnnnnnnnnnnnnnnnnnnnnnnnnnnnnnnnnnnnnnnnnnnnnnnnnnnnnnnnnnnnnnnnnnnnnnnnnnnnnnnnnnnnnnnnnnnnnnnnnnnnnnnnnnnnnnnnnnnnnnnnnnnnnnnnnnnnnnnnnnnnnnnnnnnnnnnnnnnnnnnnnnnnnnnnnnnnnnnnnnnnnnnnnnnnnnnnnnnnnnnnnnnnnnnnnnnnnnnnnnnnnnnnnnnnnnnnnnnnnnnnnnnnnnnnnnnnnnnnnnnnnnnnnnnnnnnnnnnnnnnnnnnnnnnnnnnnnnnnnnnnnnnnnnnnnnnnnnnnnnnnnnnnnnnnnnnnnnnnnnnnnnnnnnnnnnnnnnnnnnnnnnnnnnnnnnnnnnnnnnnnnnnnnnnnnnnnnnnnnnnnnnnnnnnnnnnnnnnnnnnnnnnnnnnnnnnnnnnnnnnnnnnnnnnnnnnnnnnnnnnnnnnnnnnnnnnnnnnnnnnnnnnnnnnnnnnnnnnnnnnnnnnnnnnnnnnnnnnnnnnnnnnnnnnnnnnnnnnnnnnnnnnnnnnnnnnnnnnnnnnnnnnnnnnnnnnnnnnnnnnnnnnnnnnnnnnnnnnnnnnnnnnnnnnnnnnnnnnnnnnnnnnnnnnnnnnnnnnnnnnnnnnnnnnnnnnnnnnnnnnnnnnnnnnnnnnnnnnnnnnnnnnnnnnnnnnnnnnnnnnnnnnnnnnnnnnnnnnnnnnnnnnnnnnnnnnnnnnnnnnnnnnnnnnnnnnnnnnnnnnnnnnnnnnnnnnnnnnnnnnnnnnnnnnnnnnnnnnnnnnnnnnnnnnnnnnnnnnnnnnnnnnnnnnnnnnnnnnnnnnnnnnnnnnnnnnnnnnnnnnnnnnnnnnnnnnnnnnnnnnnnnnnnnnnnnnnnnnnnnnnnnnnnnnnnnnnnnnnnnnnnnnnnnnnnnnnnnnnnnnnnnnnnnnnnnnnnnnnnnnnnnnnnnnnnnnnnnnnnnnnnnnnnnnnnnnnnnnnnnnnnnnnnnnnnnnnnnnnnnnnnnnnnnnnnnnnnnnnnnnnnnnnnnnnnnnnnnnnnnnnnnnnnnnnnnnnnnnnnnnnnnnnnnnnnnnnnnnnnnnnnnnnnnnnnnnnnnnnnnnnnnnnnnnnnnnnnnnnnnnnnnnnnnnnnnnnnnnnnnnnnnnnnnnnnnnnnnnnnnnnnnnnnnnnnnnnnnnnnnnnnnnnnnnnnnnnnnnnnnnnnnnnnnnnnnnnnnnnnnnnnnnnnnnnnnnnnnnnnnnnnnnnnnnnnnnnnnnnnnnnnnnnnnnnnnnnnnnnnnnnnnnnnnnnnnnnnnnnnnnnnnnnnnnnnnnnnnnnnnnnnnnnnnnnnnnnnnnnnnnnnnnnnnnnnnnnnnnnnnnnnnnnnnnnnnnnnnnnnnnnnnnnnnnnnnnnnnnnnnnnnnnnnnnnnnnnnnnnnnnnnnnnnnnnnnnnnnnnnnnnnnnnnnnnnnnnnnnnnnnnnnnnnnnnnnnnnnnnnnnnnnnnnnnnnnnnnnnnnnnnnnnnnnnnnnnnnnnnnnnnnnnnnnnnnnnnnnnnnnnnnnnnnnnnnnnnnnnnnnnnnnnnnnnnnnnnnnnnnnnnnnnnnnnnnnnnnnnnnnnnnnnnnnnnnnnnnnnnnnnnnnnnnnnnnnnnnnnnnnnnnnnnnnnnnnnnnnnnnnnnnnnnnnnnnnnnnnnnnnnnnnnnnnnnnnnnnnnnnnnnnnnnnnnnnnnnnnnnnnnnnnnnnnnnnnnnnnnnnnnnnnnnnnnnnnnnnnnnnnnnnnnnnnnnnnnnnnnnnnnnnnnnnnnnnnnnnnnnnnnnnnnnnnnnnnnnnnnnnnnnnnnnnnnnnnnnnnnnnnnnnnnnnnnnnnnnnnnnnnnnnnnnnnnnnnnnnnnnnnnnnnnnnnnnnnnnnnnnnnnnnnnnnnnnnnnnnnnnnnnnnnnnnnnnnnnnnnnnnnnnnnnnnnnnnnnnnnnnnnnnnnnnnnnnnnnnnnnnnnnnnnnnnnnnnnnnnnnnnnnnnnnnnnnnnnnnnnnnnnnnnnnnnnnnnnnnnnnnnnnnnnnnnnnnnnnnnnnnnnnnnnnnnnnnnnnnnnnnnnnnnnnnnnnnnnnnnnnnnnnnnnnnnnnnnnnnnnnnnnnnnnnnnnnnnnnnnnnnnnnnnnnnnnnnnnnnnnnnnnnnnnnnnnnnnnnnnnnnnnnnnnnnnnnnnnnnnnnnnnnnnnnnnnnnnnnnnnnnnnnnnnnnnnnnnnnnnnnnnnnnnnnnnnnnnnnnnnnnnnnnnnnnnnnnnnnnnnnnnnnnnnnnnnnnnnnnnnnnnnnnnnnnnnnnnnnnnnnnnnnnnnnnnnnnnnnnnnnnnnnnnnnnnnnnnnnnnnnnnnnnnnnnnnnnnnnnnnnnnnnnnnnnnnnnnnnnnnnnnnnnnnnnnnnnnnnnnnnnnnnnnnnnnnnnnnnnnnnnnnnnnnnnnnnnnnnnnnnnnnnnnnnnnnnnnnnnnnnnnnnnnnnnnnnnnnnnnnnnnnnnnnnnnnnnnnnnnnnnnnnnnnnnnnnnnnnnnnnnnnnnnnnnnnnnnnnnnnnnnnnnnnnnnnnnnnnnnnnnnnnnnnnnnnnnnnnnnnnnnnnnnnnnnnnnnnnnnnnnnnnnnnnnnnnnnnnnnnnnnnnnnnnnnnnnnnnnnnnnnnnnnnnnnnnnnnnnnnnnnnnnnnnnnnnnnnnnnnnnnnnnnnnnnnnnnnnnnnnnnnnnnnnnnnnnnnnnnnnnnnnnnnnnnnnnnnnnnnnnnnnnnnnnnnnnnnnnnnnnnnnnnnnnnnnnnnnnnnnnnnnnnnnnnnnnnnnnnnnnnnnnnnnnnnnnnnnnnnnnnnnnnnnnnnnnnnnnnnnnnnnnnnnnnnnnnnnnnnnnnnnnnnnnnnnnnnnnnnnnnnnnnnnnnnnnnnnnnnnnnnnnnnnnnnnnnnnnnnnnnnnnnnnnnnnnnnnnnnnnnnnnnnnnnnnnnnnnnnnnnnnnnnnnnnnnnnnnnnnnnnnnnnnnnnnnnnnnnnnnnnnnnnnnnnnnnnnnnnnnnnnnnnnnnnnnnnnnnnnnnnnnnnnnnnnnnnnnnnnnnnnnnnnnnnnnnnnnnnnnnnnnnnnnnnnnnnnnnnnnnnnnnnnnnnnnnnnnnnnnnnnnnnnnnnnnnnnnnnnnnnnnnnnnnnnnnnnnnnnnnnnnnnnnnnnnnnnnnnnnnnnnnnnnnnnnnnnnnnnnnnnnnnnnnnnnnnnnnnnnnnnnnnnnnnnnnnnnnnnnnnnnnnnnnnnnnnnnnnnnnnnnnnnnnnnnnnnnnnnnnnnnnnnnnnnnnnnnnnnnnnnnnnnnnnnnnnnnnnnnnnnnnnnnnnnnnnnnnnnnnnnnnnnnnnnnnnnnnnnnnnnnnnnnnnnnnnnnnnnnnnnnnnnnnnnnnnnnnnnnnnnnnnnnnnnnnnnnnnnnnnnnnnnnnnnnnnnnnnnnnnnnnnnnnnnnnnnnnnnnnnnnnnnnnnnnnnnnnnnnnnnnnnnnnnnnnnnnnnnnnnnnnnnnnnnnnnnnnnnnnnnnnnnnnnnnnnnnnnnnnnnnnnnnnnnnnnnnnnnnnnnnnnnnnnnnnnnnnnnnnnnnnnnnnnnnnnnnnnnnnnnnnnnnnnnnnnnnnnnnnnnnnnnnnnnnnnnnnnnnnnnnnnnnnnnnnnnnnnnnnnnnnnnnnnnnnnnnnnnnnnnnnnnnnnnnnnnnnnnnnnnnnnnnnnnnnnnnnnnnnnnnnnnnnnnnnnnnnnnnnnnnnnnnnnnnnnnnnnnnnnnnnnnnnnnnnnnnnnnnnnnnnnnnnnnnnnnnnnnnnnnnnnnnnnnnnnnnnnnnnnnnnnnnnnnnnnnnnnnnnnnnnnnnnnnnnnnnnnnnnnnnnnnnnnnnnnnnnnnnnnnnnnnnnnnnnnnnnnnnnnnnnnnnnnnnnnnnnnnnnnnnnnnnnnnnnnnnnnnnnnnnnnnnnnnnnnnnnnnnnnnnnnnnnnnnnnnnnnnnnnnnnnnnnnnnnnnnnnnnnnnnnnnnnnnnnnnnnnnnnnnnnnnnnnnnnnnnnnnnnnnnnnnnnnnnnnnnnnnnnnnnnnnnnnnnnnnnnnnnnnnnnnnnnnnnnnnnnnnnnnnnnnnnnnnnnnnnnnnnnnnnnnnnnnnnnnnnnnnnnnnnnnnnnnnnnnnnnnnnnnnnnnnnnnnnnnnnnnnnnnnnnnnnnnnnnnnnnnnnnnnnnnnnnnnnnnnnnnnnnnnnnnnnnnnnnnnnnnnnnnnnnnnnnnnnnnnnnnnnnnnnnnnnnnnnnnnnnnnnnnnnnnnnnnnnnnnnnnnnnnnnnnnnnnnnnnnnnnnnnnnnnnnnnnnnnnnnnnnnnnnnnnnnnnnnnnnnnnnnnnnnnnnnnnnnnnnnnnnnnnnnnnnnnnnnnnnnnnnnnnnnnnnnnnnnnnnnnnnnnnnnnnnnnnnnnnnnnnnnnnnnnnnnnnnnnnnnnnnnnnnnnnnnnnnnnnnnnnnnnnnnnnnnnnnnnnnnnnnnnnnnnnnnnnnnnnnnnnnnnnnnnnnnnnnnnnnnnnnnnnnnnnnnnnnnnnnnnnnnnnnnnnnnnnnnnnnnnnnnnnnnnnnnnnnnnnnnnnnnnnnnnnnnnnnnnnnnnnnnnnnnnnnnnnnnnnnnnnnnnnnnnnnnnnnnnnnnnnnnnnnnnnnnnnnnnnnnnnnnnnnnnnnnnnnnnnnnnnnnnnnnnnnnnnnnnnnnnnnnnnnnnnnnnnnnnnnnnnnnnnnnnnnnnnnnnnnnnnnnnnnnnnnnnnnnnnnnnnnnnnnnnnnnnnnnnnnnnnnnnnnnnnnnnnnnnnnnnnnnnnnnnnnnnnnnnnnnnnnnnnnnnnnnnnnnnnnnnnnnnnnnnnnnnnnnnnnnnnnnnnnnnnnnnnnnnnnnnnnnnnnnnnnnnnnnnnnnnnnnnnnnnnnnnnnnnnnnnnnnnnnnnnnnnnnnnnnnnnnnnnnnnnnnnnnnnnnnnnnnnnnnnnnnnnnnnnnnnnnnnnnnnnnnnnnnnnnnnnnnnnnnnnnnnnnnnnnnnnnnnnnnnnnnnnnnnnnnnnnnnnnnnnnnnnnnnnnnnnnnnnnnnnnnnnnnnnnnnnnnnnnnnnnnnnnnnnnnnnnnnnnnnnnnnnnnnnnnnnnnnnnnnnnnnnnnnnnnnnnnnnnnnnnnnnnnnnnnnnnnnnnnnnnnnnnnnnnnnnnnnnnnnnnnnnnnnnnnnnnnnnnnnnnnnnnnnnnnnnnnnnnnnnnnnnnnnnnnnnnnnnnnnnnnnnnnnnnnnnnnnnnnnnnnnnnnnnnnnnnnnnnnnnnnnnnnnnnnnnnnnnnnnnnnnnnnnnnnnnnnnnnnnnnnnnnnnnnnnnnnnnnnnnnnnnnnnnnnnnnnnnnnnnnnnnnnnnnnnnnnnnnnnnnnnnnnnnnnnnnnnnnnnnnnnnnnnnnnnnnnnnnnnnnnnnnnnnnnnnnnnnnnnnnnnnnnnnnnnnnnnnnnnnnnnnnnnnnnnnnnnnnnnnnnnnnnnnnnnnnnnnnnnnnnnnnnnnnnnnnnnnnnnnnnnnnnnnnnnnnnnnnnnnnnnnnnnnnnnnnnnnnnnnnnnnnnnnnnnnnnnnnnnnnnnnnnnnnnnnnnnnnnnnnnnnnnnnnnnnnnnnnnnnnnnnnnnnnnnnnnnnnnnnnnnnnnnnnnnnnnnnnnnnnnnnnnnnnnnnnnnnnnnnnnnnnnnnnnnnnnnnnnnnnnnnnnnnnnnnnnnnnnnnnnnnnnnnnnnnnnnnnnnnnnnnnnnnnnnnnnnnnnnnnnnnnnnnnnnnnnnnnnnnnnnnnnnnnnnnnnnnnnnnnnnnnnnnnnnnnnnnnnnnnnnnnnnnnnnnnnnnnnnnnnnnnnnnnnnnnnnnnnnnnnnnnnnnnnnnnnnnnnnnnnnnnnnnnnnnnnnnnnnnnnnnnnnnnnnnnnnnnnnnnnnnnnnnnnnnnnnnnnnnnnnnnnnnnnnnnnnnnnnnnnnnnnnnnnnnnnnnnnnnnnnnnnnnnnnnnnnnnnnnnnnnnnnnnnnnnnnnnnnnnnnnnnnnnnnnnnnnnnnnnnnnnnnnnnnnnnnnnnnnnnnnnnnnnnnnnnnnnnnnnnnnnnnnnnnnnnnnnnnnnnnnnnnnnnnnnnnnnnnnnnnnnnnnnnnnnnnnnnnnnnnnnnnnnnnnnnnnnnnnnnnnnnnnnnnnnnnnnnnnnnnnnnnnnnnnnnnnnnnnnnnnnnnnnnnnnnnnnnnnnnnnnnnnnnnnnnnnnnnnnnnnnnnnnnnnnnnnnnnnnnnnnnnnnnnnnnnnnnnnnnnnnnnnnnnnnnnnnnnnnnnnnnnnnnnnnnnnnnnnnnnnnnnnnnnnnnnnnnnnnnnnnnnnnnnnnnnnnnnnnnnnnnnnnnnnnnnnnnnnnnnnnnnnnnnnnnnnnnnnnnnnnnnnnnnnnnnnnnnnnnnnnnnnnnnnnnnnnnnnnnnnnnnnnnnnnnnnnnnnnnnnnnnnnnnnnnnnnnnnnnnnnnnnnnnnnnnnnnnnnnnnnnnnnnnnnnnnnnnnnnnnnnnnnnnnnnnnnnnnnnnnnnnnnnnnnnnnnnnnnnnnnnnnnnnnnnnnnnnnnnnnnnnnnnnnnnnnnnnnnnnnnnnnnnnnnnnnnnnnnnnnnnnnnnnnnnnnnnnnnnnnnnnnnnnnnnnnnnnnnnnnnnnnnnnnnnnnnnnnnnnnnnnnnnnnnnnnnnnnnnnnnnnnnnnnnnnnnnnnnnnnnnnnnnnnnnnnnnnnnnnnnnnnnnnnnnnnnnnnnnnnnnnnnnnnnnnnnnnnnnnnnnnnnnnnnnnnnnnnnnnnnnnnnnnnnnnnnnnnnnnnnnnnnnnnnnnnnnnnnnnnnnnnnnnnnnnnnnnnnnnnnnnnnnnnnnnnnnnnnnnnnnnnnnnnnnnnnnnnnnnnnnnnnnnnnnnnnnnnnnnnnnnnnnnnnnnnnnnnnnnnnnnnnnnnnnnnnnnnnnnnnnnnnnnnnnnnnnnnnnnnnnnnnnnnnnnnnnnnnnnnnnnnnnnnnnnnnnnnnnnnnnnnnnnnnnnnnnnnnnnnnnnnnnnnnnnnnnnnnnnnnnnnnnnnnnnnnnnnnnnnnnnnnnnnnnnnnnnnnnnnnnnnnnnnnnnnnnnnnnnnnnnnnnnnnnnnnnnnnnnnnnnnnnnnnnnnnnnnnnnnnnnnnnnnnnnnnnnnnnnnnnnnnnnnnnnnnnnnnnnnnnnnnnnnnnnnnnnnnnnnnnnnnnnnnnnnnnnnnnnnnnnnnnnnnnnnnnnnnnnnnnnnnnnnnnnnnnnnnnnnnnnnnnnnnnnnnnnnnnnnnnnnnnnnnnnnnnnnnnnnnnnnnnnnnnnnnnnnnnnnnnnnnnnnnnnnnnnnnnnnnnnnnnnnnnnnnnnnnnnnnnnnnnnnnnnnnnnnnnnnnnnnnnnnnnnnnnnnnnnnnnnnnnnnnnnnnnnnnnnnnnnnnnnnnnnnnnnnnnnnnnnnnnnnnnnnnnnnnnnnnnnnnnnnnnnnnnnnnnnnnnnnnnnnnnnnnnnnnnnnnnnnnnnnnnnnnnnnnnnnnnnnnnnnnnnnnnnnnnnnnnnnnnnnnnnnnnnnnnnnnnnnnnnnnnnnnnnnnnnnnnnnnnnnnnnnnnnnnnnnnnnnnnnnnnnnnnnnnnnnnnnnnnnnnnnnnnnnnnnnnnnnnnnnnnnnnnnnnnnnnnnnnnnnnnnnnnnnnnnnnnnnnnnnnnnnnnnnnnnnnnnnnnnnnnnnnnnnnnnnnnnnnnnnnnnnnnnnnnnnnnnnnnnnnnnnnnnnnnnnnnnnnnnnnnnnnnnnnnnnnnnnnnnnnnnnnnnnnnnnnnnnnnnnnnnnnnnnnnnnnnnnnnnnnnnnnnnnnnnnnnnnnnnnnnnnnnnnnnnnnnnnnnnnnnnnnnnnnnnnnnnnnnnnnnnnnnnnnnnnnnnnnnnnnnnnnnnnnnnnnnnnnnnnnnnnnnnnnnnnnnnnnnnnnnnnnnnnnnnnnnnnnnnnnnnnnnnnnnnnnnnnnnnnnnnnnnnnnnnnnnnnnnnnnnnnnnnnnnnnnnnnnnnnnnnnnnnnnnnnnnnnnnnnnnnnnnnnnnnnnnnnnnnnnnnnnnnnnnnnnnnnnnnnnnnnnnnnnnnnnnnnnnnnnnnnnnnnnnnnnnnnnnnnnnnnnnnnnnnnnnnnnnnnnnnnnnnnnnnnnnnnnnnnnnnnnnnnnnnnnnnnnnnnnnnnnnnnnnnnnnnnnnnnnnnnnnnnnnnnnnnnnnnnnnnnnnnnnnnnnnnnnnnnnnnnnnnnnnnnnnnnnnnnnnnnnnnnnnnnnnnnnnnnnnnnnnnnnnnnnnnnnnnnnnnnnnnnnnnnnnnnnnnnnnnnnnnnnnnnnnnnnnnnnnnnnnnnnnnnnnnnnnnnnnnnnnnnnnnnnnnnnnnnnnnnnnnnnnnnnnnnnnnnnnnnnnnnnnnnnnnnnnnnnnnnnnnnnnnnnnnnnnnnnnnnnnnnnnnnnnnnnnnnnnnnnnnnnnnnnnnnnnnnnnnnnnnnnnnnnnnnnnnnnnnnnnnnnnnnnnnnnnnnnnnnnnnnnnnnnnnnnnnnnnnnnnnnnnnnnnnnnnnnnnnnnnnnnnnnnnnnnnnnnnnnnnnnnnnnnnnnnnnnnnnnnnnnnnnnnnnnnnnnnnnnnnnnnnnnnnnnnnnnnnnnnnnnnnnnnnnnnnnnnnnnnnnnnnnnnnnnnnnnnnnnnnnnnnnnnnnnnnnnnnnnnnnnnnnnnnnnnnnnnnnnnnnnnnnnnnnnnnnnnnnnnnnnnnnnnnnnnnnnnnnnnnnnnnnnnnnnnnnnnnnnnnnnnnnnnnnnnnnnnnnnnnnnnnnnnnnnnnnnnnnnnnnnnnnnnnnnnnnnnnnnnnnnnnnnnnnnnnnnnnnnnnnnnnnnnnnnnnnnnnnnnnnnnnnnnnnnnnnnnnnnnnnnnnnnnnnnnnnnnnnnnnnnnnnnnnnnnnnnnnnnnnnnnnnnnnnnnnnnnnnnnnnnnnnnnnnnnnnnnnnnnnnnnnnnnnnnnnnnnnnnnnnnnnnnnnnnnnnnnnnnnnnnnnnnnnnnnnnnnnnnnnnnnnnnnnnnnnnnnnnnnnnnnnnnnnnnnnnnnnnnnnnnnnnnnnnnnnnnnnnnnnnnnnnnnnnnnnnnnnnnnnnnnnnnnnnnnnnnnnnnnnnnnnnnnnnnnnnnnnnnnnnnnnnnnnnnnnnnnnnnnnnnnnnnnnnnnnnnnnnnnnnnnnnnnnnnnnnnnnnnnnnnnnnnnnnnnnnnnnnnnnnnnnnnnnnnnnnnnnnnnnnnnnnnnnnnnnnnnnnnnnnnnnnnnnnnnnnnnnnnnnnnnnnnnnnnnnnnnnnnnnnnnnnnnnnnnnnnnnnnnnnnnnnnnnnnnnnnnnnnnnnnnnnnnnnnnnnnnnnnnnnnnnnnnnnnnnnnnnnnnnnnnnnnnnnnnnnnnnnnnnnnnnnnnnnnnnnnnnnnnnnnnnnnnnnnnnnnnnnnnnnnnnnnnnnnnnnnnnnnnnnnnnnnnnnnnnnnnnnnnnnnnnnnnnnnnnnnnnnnnnnnnnnnnnnnnnnnnnnnnnnnnnnnnnnnnnnnnnnnnnnnnnnnnnnnnnnnnnnnnnnnnnnnnnnnnnnnnnnnnnnnnnnnnnnnnnnnnnnnnnnnnnnnnnnnnnnnnnnnnnnnnnnnnnnnnnnnnnnnnnnnnnnnnnnnnnnnnnnnnnnnnnnnnnnnnnnnnnnnnnnnnnnnnnnnnnnnnnnnnnnnnnnnnnnnnnnnnnnnnnnnnnnnnnnnnnnnnnnnnnnnnnnnnnnnnnnnnnnnnnnnnnnnnnnnnnnnnnnnnnnnnnnnnnnnnnnnnnnnnnnnnnnnnnnnnnnnnnnnnnnnnnnnnnnnnnnnnnnnnnnnnnnnnnnnnnnnnnnnnnnnnnnnnnnnnnnnnnnnnnnnnnnnnnnnnnnnnnnnnnnnnnnnnnnnnnnnnnnnnnnnnnnnnnnnnnnnnnnnnnnnnnnnnnnnnnnnnnnnnnnnnnnnnnnnnnnnnnnnnnnnnnnnnnnnnnnnnnnnnnnnnnnnnnnnnnnnnnnnnnnnnnnnnnnnnnnnnnnnnnnnnnnnnnnnnnnnnnnnnnnnnnnnnnnnnnnnnnnnnnnnnnnnnnnnnnnnnnnnnnnnnnnnnnnnnnnnnnnnnnnnnnnnnnnnnnnnnnnnnnnnnnnnnnnnnnnnnnnnnnnnnnnnnnnnnnnnnnnnnnnnnnnnnnnnnnnnnnnnnnnnnnnnnnnnnnnnnnnnnnnnnnnnnnnnnnnnnnnnnnnnnnnnnnnnnnnnnnnnnnnnnnnnnnnnnnnnnnnnnnnnnnnnnnnnnnnnnnnnnnnnnnnnnnnnnnnnnnnnnnnnnnnnnnnnnnnnnnnnnnnnnnnnnnnnnnnnnnnnnnnnnnnnnnnnnnnnnnnnnnnnnnnnnnnnnnnnnnnnnnnnnnnnnnnnnnnnnnnnnnnnnnnnnnnnnnnnnnnnnnnnnnnnnnnnnnnnnnnnnnnnnnnnnnnnnnnnnnnnnnnnnnnnnnnnnnnnnnnnnnnnnnnnnnnnnnnnnnnnnnnnnnnnnnnnnnnnnnnnnnnnnnnnnnnnnnnnnnnnnnnnnnnnnnnnnnnnnnnnnnnnnnnnnnnnnnnnnnnnnnnnnnnnnnnnnnnnnnnnnnnnnnnnnnnnnnnnnnnnnnnnnnnnnnnnnnnnnnnnnnnnnnnnnnnnnnnnnnnnnnnnnnnnnnnnnnnnnnnnnnnnnnnnnnnnnnnnnnnnnnnnnnnnnnnnnnnnnnnnnnnnnnnnnnnnnnnnnnnnnnnnnnnnnnnnnnnnnnnnnnnnnnnnnnnnnnnnnnnnnnnnnnnnnnnnnnnnnnnnnnnnnnnnnnnnnnnnnnnnnnnnnnnnnnnnnnnnnnnnnnnnnnnnnnnnnnnnnnnnnnnnnnnnnnnnnnnnnnnnnnnnnnnnnnnnnnnnnnnnnnnnnnnnnnnnnnnnnnnnnnnnnnnnnnnnnnnnnnnnnnnnnnnnnnnnnnnnnnnnnnnnnnnnnnnnnnnnnnnnnnnnnnnnnnnnnnnnnnnnnnnnnnnnnnnnnnnnnnnnnnnnnnnnnnnnnnnnnnnnnnnnnnnnnnnnnnnnnnnnnnnnnnnnnnnnnnnnnnnnnnnnnnnnnnnnnnnnnnnnnnnnnnnnnnnnnnnnnnnnnnnnnnnnnnnnnnnnnnnnnnnnnnnnnnnnnnnnnnnnnnnnnnnnnnnnnnnnnnnnnnnnnnnnnnnnnnnnnnnnnnnnnnnnnnnnnnnnnnnnnnnnnnnnnnnnnnnnnnnnnnnnnnnnnnnnnnnnnnnnnnnnnnnnnnnnnnnnnnnnnnnnnnnnnnnnnnnnnnnnnnnnnnnnnnnnnnnnnnnnnnnnnnnnnnnnnnnnnnnnnnnnnnnnnnnnnnnnnnnnnnnnnnnnnnnnnnnnnnnnnnnnnnnnnnnnnnnnnnnnnnnnnnnnnnnnnnnnnnnnnnnnnnnnnnnnnnnnnnnnnnnnnnnnnnnnnnnnnnnnnnnnnnnnnnnnnnnnnnnnnnnnnnnnnnnnnnnnnnnnnnnnnnnnnnnnnnnnnnnnnnnnnnnnnnnnnnnnnnnnnnnnnnnnnnnnnnnnnnnnnnnnnnnnnnnnnnnnnnnnnnnnnnnnnnnnnnnnnnnnnnnnnnnnnnnnnnnnnnnnnnnnnnnnnnnnnnnnnnnnnnnnnnnnnnnnnnnnnnnnnnnnnnnnnnnnnnnnnnnnnnnnnnnnnnnnnnnnnnnnnnnnnnnnnnnnnnnnnnnnnnnnnnnnnnnnnnnnnnnnnnnnnnnnnnnnnnnnnnnnnnnnnnnnnnnnnnnnnnnnnnnnnnnnnnnnnnnnnnnnnnnnnnnnnnnnnnnnnnnnnnnnnnnnnnnnnnnnnnnnnnnnnnnnnnnnnnnnnnnnnnnnnnnnnnnnnnnnnnnnnnnnnnnnnnnnnnnnnnnnnnnnnnnnnnnnnnnnnnnnnnnnnnnnnnnnnnnnnnnnnnnnnnnnnnnnnnnnnnnnnnnnnnnnnnnnnnnnnnnnnnnnnnnnnnnnnnnnnnnnnnnnnnnnnnnnnnnnnnnnnnnnnnnnnnnnnnnnnnnnnnnnnnnnnnnnnnnnnnnnnnnnnnnnnnnnnnnnnnnnnnnnnnnnnnnnnnnnnnnnnnnnnnnnnnnnnnnnnnnnnnnnnnnnnnnnnnnnnnnnnnnnnnnnnnnnnnnnnnnnnnnnnnnnnnnnnnnnnnnnnnnnnnnnnnnnnnnnnnnnnnnnnnnnnnnnnnnnnnnnnnnnnnnnnnnnnnnnnnnnnnnnnnnnnnnnnnnnnnnnnnnnnnnnnnnnnnnnnnnnnnnnnnnnnnnnnnnnnnnnnnnnnnnnnnnnnnnnnnnnnnnnnnnnnnnnnnnnnnnnnnnnnnnnnnnnnnnnnnnnnnnnnnnnnnnnnnnnnnnnnnnnnnnnnnnnnnnnnnnnnnnnnnnnnnnnnnnnnnnnnnnnnnnnnnnnnnnnnnnnnnnnnnnnnnnnnnnnnnnnnnnnnnnnnnnnnnnnnnnnnnnnnnnnnnnnnnnnnnnnnnnnnnnnnnnnnnnnnnnnnnnnnnnnnnnnnnnnnnnnnnnnnnnnnnnnnnnnnnnnnnnnnnnnnnnnnnnnnnnnnnnnnnnnnnnnnnnnnnnnnnnnnnnnnnnnnnnnnnnnnnnnnnnnnnnnnnnnnnnnnnnnnnnnnnnnnnnnnnnnnnnnnnnnnnnnnnnnnnnnnnnnnnnnnnnnnnnnnnnnnnnnnnnnnnnnnnnnnnnnnnnnnnnnnnnnnnnnnnnnnnnnnnnnnnnnnnnnnnnnnnnnnnnnnnnnnnnnnnnnnnnnnnnnnnnnnnnnnnnnnnnnnnnnnnnnnnnnnnnnnnnnnnnnnnnnnnnnnnnnnnnnnnnnnnnnnnnnnnnnnnnnnnnnnnnnnnnnnnnnnnnnnnnnnnnnnnnnnnnnnnnnnnnnnnnnnnnnnnnnnnnnnnnnnnnnnnnnnnnnnnnnnnnnnnnnnnnnnnnnnnnnnnnnnnnnnnnnnnnnnnnnnnnnnnnnnnnnnnnnnnnnnnnnnnnnnnnnnnnnnnnnnnnnnnnnnnnnnnnnnnnnnnnnnnnnnnnnnnnnnnnnnnnnnnnnnnnnnnnnnnnnnnnnnnnnnnnnnnnnnnnnnnnnnnnnnnnnnnnnnnnnnnnnnnnnnnnnnnnnnnnnnnnnnnnnnnnnnnnnnnnnnnnnnnnnnnnnnnnnnnnnnnnnnnnnnnnnnnnnnnnnnnnnnnnnnnnnnnnnnnnnnnnnnnnnnnnnnnnnnnnnnnnnnnnnnnnnnnnnnnnnnnnnnnnnnnnnnnnnnnnnnnnnnnnnnnnnnnnnnnnnnnnnnnnnnnnnnnnnnnnnnnnnnnnnnnnnnnnnnnnnnnnnnnnnnnnnnnnnnnnnnnnnnnnnnnnnnnnnnnnnnnnnnnnnnnnnnnnnnnnnnnnnnnnnnnnnnnnnnnnnnnnnnnnnnnnnnnnnnnnnnnnnnnnnnnnnnnnnnnnnnnnnnnnnnnnnnnnnnnnnnnnnnnnnnnnnnnnnnnnnnnnnnnnnnnnnnnnnnnnnnnnnnnnnnnnnnnnnnnnnnnnnnnnnnnnnnnnnnnnnnnnnnnnnnnnnnnnnnnnnnnnnnnnnnnnnnnnnnnnnnnnnnnnnnnnnnnnnnnnnnnnnnnnnnnnnnnnnnnnnnnnnnnnnnnnnnnnnnnnnnnnnnnnnnnnnnnnnnnnnnnnnnnnnnnnnnnnnnnnnnnnnnnnnnnnnnnnnnnnnnnnnnnnnnnnnnnnnnnnnnnnnnnnnnnnnnnnnnnnnnnnnnnnnnnnnnnnnnnnnnnnnnnnnnnnnnnnnnnnnnnnnnnnnnnnnnnnnnnnnnnnnnnnnnnnnnnnnnnnnnnnnnnnnnnnnnnnnnnnnnnnnnnnnnnnnnnnnnnnnnnnnnnnnnnnnnnnnnnnnnnnnnnnnnnnnnnnnnnnnnnnnnnnnnnnnnnnnnnnnnnnnnnnnnnnnnnnnnnnnnnnnnnnnnnnnnnnnnnnnnnnnnnnnnnnnnnnnnnnnnnnnnnnnnnnnnnnnnnnnnnnnnnnnnnnnnnnnnnnnnnnnnnnnnnnnnnnnnnnnnnnnnnnnnnnnnnnnnnnnnnnnnnnnnnnnnnnnnnnnnnnnnnnnnnnnnnnnnnnnnnnnnnnnnnnnnnnnnnnnnnnnnnnnnnnnnnnnnnnnnnnnnnnnnnnnnnnnnnnnnnnnnnnnnnnnnnnnnnnnnnnnnnnnnnnnnnnnnnnnnnnnnnnnnnnnnnnnnnnnnnnnnnnnnnnnnnnnnnnnnnnnnnnnnnnnnnnnnnnnnnnnnnnnnnnnnnnnnnnnnnnnnnnnnnnnnnnnnnnnnnnnnnnnnnnnnnnnnnnnnnnnnnnnnnnnnnnnnnnnnnnnnnnnnnnnnnnnnnnnnnnnnnnnnnnnnnnnnnnnnnnnnnnnnnnnnnnnnnnnnnnnnnnnnnnnnnnnnnnnnnnnnnnnnnnnnnnnnnnnnnnnnnnnnnnnnnnnnnnnnnnnnnnnnnnnnnnnnnnnnnnnnnnnnnnnnnnnnnnnnnnnnnnnnnnnnnnnnnnnnnnnnnnnnnnnnnnnnnnnnnnnnnnnnnnnnnnnnnnnnnnnnnnnnnnnnnnnnnnnnnnnnnnnnnnnnnnnnnnnnnnnnnnnnnnnnnnnnnnnnnnnnnnnnnnnnnnnnnnnnnnnnnnnnnnnnnnnnnnnnnnnnnnnnnnnnnnnnnnnnnnnnnnnnnnnnnnnnnnnnnnnnnnnnnnnnnnnnnnnnnnnnnnnnnnnnnnnnnnnnnnnnnnnnnnnnnnnnnnnnnnnnnnnnnnnnnnnnnnnnnnnnnnnnnnnnnnnnnnnnnnnnnnnnnnnnnnnnnnnnnnnnnnnnnnnnnnnnnnnnnnnnnnnnnnnnnnnnnnnnnnnnnnnnnnnnnnnnnnnnnnnnnnnnnnnnnnnnnnnnnnnnnnnnnnnnnnnnnnnnnnnnnnnnnnnnnnnnnnnnnnnnnnnnnnnnnnnnnnnnnnnnnnnnnnnnnnnnnnnnnnnnnnnnnnnnnnnnnnnnnnnnnnnnnnnnnnnnnnnnnnnnnnnnnnnnnnnnnnnnnnnnnnnnnnnnnnnnnnnnnnnnnnnnnnnnnnnnnnnnnnnnnnnnnnnnnnnnnnnnnnnnnnnnnnnnnnnnnnnnnnnnnnnnnnnnnnnnnnnnnnnnnnnnnnnnnnnnnnnnnnnnnnnnnnnnnnnnnnnnnnnnnnnnnnnnnnnnnnnnnnnnnnnnnnnnnnnnnnnnnnnnnnnnnnnnnnnnnnnnnnnnnnnnnnnnnnnnnnnnnnnnnnnnnnnnnnnnnnnnnnnnnnnnnnnnnnnnnnnnnnnnnnnnnnnnnnnnnnnnnnnnnnnnnnnnnnnnnnnnnnnnnnnnnnnnnnnnnnnnnnnnnnnnnnnnnnnnnnnnnnnnnnnnnnnnnnnnnnnnnnnnnnnnnnnnnnnnnnnnnnnnnnnnnnnnnnnnnnnnnnnnnnnnnnnnnnnnnnnnnnnnnnnnnnnnnnnnnnnnnnnnnnnnnnnnnnnnnnnnnnnnnnnnnnnnnnnnnnnnnnnnnnnnnnnnnnnnnnnnnnnnnnnnnnnnnnnnnnnnnnnnnnnnnnnnnnnnnnnnnnnnnnnnnnnnnnnnnnnnnnnnnnnnnnnnnnnnnnnnnnnnnnnnnnnnnnnnnnnnnnnnnnnnnnnnnnnnnnnnnnnnnnnnnnnnnnnnnnnnnnnnnnnnnnnnnnnnnnnnnnnnnnnnnnnnnnnnnnnnnnnnnnnnnnnnnnnnnnnnnnnnnnnnnnnnnnnnnnnnnnnnnnnnnnnnnnnnnnnnnnnnnnnnnnnnnnnnnnnnnnnnnnnnnnnnnnnnnnnnnnnnnnnnnnnnnnnnnnnnnnnnnnnnnnnnnnnnnnnnnnnnnnnnnnnnnnnnnnnnnnnnnnnnnnnnnnnnnnnnnnnnnnnnnnnnnnnnnnnnnnnnnnnnnnnnnnnnnnnnnnnnnnnnnnnnnnnnnnnnnnnnnnnnnnnnnnnnnnnnnnnnnnnnnnnnnnnnnnnnnnnnnnnnnnnnnnnnnnnnnnnnnnnnnnnnnnnnnnnnnnnnnnnnnnnnnnnnnnnnnnnnnnnnnnnnnnnnnnnnnnnnnnnnnnnnnnnnnnnnnnnnnnnnnnnnnnnnnnnnnnnnnnnnnnnnnnnnnnnnnnnnnnnnnnnnnnnnnnnnnnnnnnnnnnnnnnnnnnnnnnnnnnnnnnnnnnnnnnnnnnnnnnnnnnnnnnnnnnnnnnnnnnnnnnnnnnnnnnnnnnnnnnnnnnnnnnnnnnnnnnnnnnnnnnnnnnnnnnnnnnnnnnnnnnnnnnnnnnnnnnnnnnnnnnnnnnnnnnnnnnnnnnnnnnnnnnnnnnnnnnnnnnnnnnnnnnnnnnnnnnnnnnnnnnnnnnnnnnnnnnnnnnnnnnnnnnnnnnnnnnnnnnnnnnnnnnnnnnnnnnnnnnnnnnnnnnnnnnnnnnnnnnnnnnnnnnnnnnnnnnnnnnnnnnnnnnnnnnnnnnnnnnnnnnnnnnnnnnnnnnnnnnnnnnnnnnnnnnnnnnnnnnnnnnnnnnnnnnnnnnnnnnnnnnnnnnnnnnnnnnnnnnnnnnnnnnnnnnnnnnnnnnnnnnnnnnnnnnnnnnnnnnnnnnnnnnnnnnnnnnnnnnnnnnnnnnnnnnnnnnnnnnnnnnnnnnnnnnnnnnnnnnnnnnnnnnnnnnnnnnnnnnnnnnnnnnnnnnnnnnnnnnnnnnnnnnnnnnnnnnnnnnnnnnnnnnnnnnnnnnnnnnnnnnnnnnnnnnnnnnnnnnnnnnnnnnnnnnnnnnnnnnnnnnnnnnnnnnnnnnnnnnnnnnnnnnnnnnnnnnnnnnnnnnnnnnnnnnnnnnnnnnnnnnnnnnnnnnnnnnnnnnnnnnnnnnnnnnnnnnnnnnnnnnnnnnnnnnnnnnnnnnnnnnnnnnnnnnnnnnnnnnnnnnnnnnnnnnnnnnnnnnnnnnnnnnnnnnnnnnnnnnnnnnnnnnnnnnnnnnnnnnnnnnnnnnnnnnnnnnnnnnnnnnnnnnnnnnnnnnnnnnnnnnnnnnnnnnnnnnnnnnnnnnnnnnnnnnnnnnnnnnnnnnnnnnnnnnnnnnnnnnnnnnnnnnnnnnnnnnnnnnnnnnnnnnnnnnnnnnnnnnnnnnnnnnnnnnnnnnnnnnnnnnnnnnnnnnnnnnnnnnnnnnnnnnnnnnnnnnnnnnnnnnnnnnnnnnnnnnnnnnnnnnnnnnnnnnnnnnnnnnnnnnnnnnnnnnnnnnnnnnnnnnnnnnnnnnnnnnnnnnnnnnnnnnnnnnnnnnnnnnnnnnnnnnnnnnnnnnnnnnnnnnnnnnnnnnnnnnnnnnnnnnnnnnnnnnnnnnnnnnnnnnnnnnnnnnnnnnnnnnnnnnnnnnnnnnnnnnnnnnnnnnnnnnnnnnnnnnnnnnnnnnnnnnnnnnnnnnnnnnnnnnnnnnnnnnnnnnnnnnnnnnnnnnnnnnnnnnnnnnnnnnnnnnnnnnnnnnnnnnnnnnnnnnnnnnnnnnnnnnnnnnnnnnnnnnnnnnnnnnnnnnnnnnnnnnnnnnnnnnnnnnnnnnnnnnnnnnnnnnnnnnnnnnnnnnnnnnnnnnnnnnnnnnnnnnnnnnnnnnnnnnnnnnnnnnnnnnnnnnnnnnnnnnnnnnnnnnnnnnnnnnnnnnnnnnnnnnnnnnnnnnnnnnnnnnnnnnnnnnnnnnnnnnnnnnnnnnnnnnnnnnnnnnnnnnnnnnnnnnnnnnnnnnnnnnnnnnnnnnnnnnnnnnnnnnnnnnnnnnnnnnnnnnnnnnnnnnnnnnnnnnnnnnnnnnnnnnnnnnnnnnnnnnnnnnnnnnnnnnnnnnnnnnnnnnnnnnnnnnnnnnnnnnnnnnnnnnnnnnnnnnnnnnnnnnnnnnnnnnnnnnnnnnnnnnnnnnnnnnnnnnnnnnnnnnnnnnnnnnnnnnnnnnnnnnnnnnnnnnnnnnnnnnnnnnnnnnnnnnnnnnnnnnnnnnnnnnnnnnnnnnnnnnnnnnnnnnnnnnnnnnnnnnnnnnnnnnnnnnnnnnnnnnnnnnnnnnnnnnnnnnnnnnnnnnnnnnnnnnnnnnnnnnnnnnnnnnnnnnnnnnnnnnnnnnnnnnnnnnnnnnnnnnnnnnnnnnnnnnnnnnnnnnnnnnnnnnnnnnnnnnnnnnnnnnnnnnnnnnnnnnnnnnnnnnnnnnnnnnnnnnnnnnnnnnnnnnnnnnnnnnnnnnnnnnnnnnnnnnnnnnnnnnnnnnnnnnnnnnnnnnnnnnnnnnnnnnnnnnnnnnnnnnnnnnnnnnnnnnnnnnnnnnnnnnnnnnnnnnnnnnnnnnnnnnnnnnnnnnnnnnnnnnnnnnnnnnnnnnnnnnnnnnnnnnnnnnnnnnnnnnnnnnnnnnnnnnnnnnnnnnnnnnnnnnnnnnnnnnnnnnnnnnnnnnnnnnnnnnnnnnnnnnnnnnnnnnnnnnnnnnnnnnnnnnnnnnnnnnnnnnnnnnnnnnnnnnnnnnnnnnnnnnnnnnnnnnnnnnnnnnnnnnnnnnnnnnnnnnnnnnnnnnnnnnnnnnnnnnnnnnnnnnnnnnnnnnnnnnnnnnnnnnnnnnnnnnnnnnnnnnnnnnnnnnnnnnnnnnnnnnnnnnnnnnnnnnnnnnnnnnnnnnnnnnnnnnnnnnnnnnnnnnnnnnnnnnnnnnnnnnnnnnnnnnnnnnnnnnnnnnnnnnnnnnnnnnnnnnnnnnnnnnnnnnnnnnnnnnnnnnnnnnnnnnnnnnnnnnnnnnnnnnnnnnnnnnnnnnnnnnnnnnnnnnnnnnnnnnnnnnnnnnnnnnnnnnnnnnnnnnnnnnnnnnnnnnnnnnnnnnnnnnnnnnnnnnnnnnnnnnnnnnnnnnnnnnnnnnnnnnnnnnnnnnnnnnnnnnnnnnnnnnnnnnnnnnnnnnnnnnnnnnnnnnnnnnnnnnnnnnnnnnnnnnnnnnnnnnnnnnnnnnnnnnnnnnnnnnnnnnnnnnnnnnnnnnnnnnnnnnnnnnnnnnnnnnnnnnnnnnnnnnnnnnnnnnnnnnnnnnnnnnnnnnnnnnnnnnnnnnnnnnnnnnnnnnnnnnnnnnnnnnnnnnnnnnnnnnnnnnnnnnnnnnnnnnnnnnnnnnnnnnnnnnnnnnnnnnnnnnnnnnnnnnnnnnnnnnnnnnnnnnnnnnnnnnnnnnnnnnnnnnnnnnnnnnnnnnnnnnnnnnnnnnnnnnnnnnnnnnnnnnnnnnnnnnnnnnnnnnnnnnnnnnnnnnnnnnnnnnnnnnnnnnnnnnnnnnnnnnnnnnnnnnnnnnnnnnnnnnnnnnnnnnnnnnnnnnnnnnnnnnnnnnnnnnnnnnnnnnnnnnnnnnnnnnnnnnnnnnnnnnnnnnnnnnnnnnnnnnnnnnnnnnnnnnnnnnnnnnnnnnnnnnnnnnnnnnnnnnnnnnnnnnnnnnnnnnnnnnnnnnnnnnnnnnnnnnnnnnnnnnnnnnnnnnnnnnnnnnnnnnnnnnnnnnnnnnnnnnnnnnnnnnnnnnnnnnnnnnnnnnnnnnnnnnnnnnnnnnnnnnnnnnnnnnnnnnnnnnnnnnnnnnnnnnnnnnnnnnnnnnnnnnnnnnnnnnnnnnnnnnnnnnnnnnnnnnnnnnnnnnnnnnnnnnnnnnnnnnnnnnnnnnnnnnnnnnnnnnnnnnnnnnnnnnnnnnnnnnnnnnnnnnnnnnnnnnnnnnnnnnnnnnnnnnnnnnnnnnnnnnnnnnnnnnnnnnnnnnnnnnnnnnnnnnnnnnnnnnnnnnnnnnnnnnnnnnnnnnnnnnnnnnnnnnnnnnnnnnnnnnnnnnnnnnnnnnnnnnnnnnnnnnnnnnnnnnnnnnnnnnnnnnnnnnnnnnnnnnnnnnnnnnnnnnnnnnnnnnnnnnnnnnnnnnnnnnnnnnnnnnnnnnnnnnnnnnnnnnnnnnnnnnnnnnnnnnnnnnnnnnnnnnnnnnnnnnnnnnnnnnnnnnnnnnnnnnnnnnnnnnnnnnnnnnnnnnnnnnnnnnnnnnnnnnnnnnnnnnnnnnnnnnnnnnnnnnnnnnnnnnnnnnnnnnnnnnnnnnnnnnnnnnnnnnnnnnnnnnnnnnnnnnnnnnnnnnnnnnnnnnnnnnnnnnnnnnnnnnnnnnnnnnnnnnnnnnnnnnnnnnnnnnnnnnnnnnnnnnnnnnnnnnnnnnnnnnnnnnnnnnnnnnnnnnnnnnnnnnnnnnnnnnnnnnnnnnnnnnnnnnnnnnnnnnnnnnnnnnnnnnnnnnnnnnnnnnnnnnnnnnnnnnnnnnnnnnnnnnnnnnnnnnnnnnnnnnnnnnnnnnnnnnnnnnnnnnnnnnnnnnnnnnnnnnnnnnnnnnnnnnnnnnnnnnnnnnnnnnnnnnnnnnnnnnnnnnnnnnnnnnnnnnnnnnnnnnnnnnnnnnnnnnnnnnnnnnnnnnnnnnnnnnnnnnnnnnnnnnnnnnnnnnnnnnnnnnnnnnnnnnnnnnnnnnnnnnnnnnnnnnnnnnnnnnnnnnnnnnnnnnnnnnnnnnnnnnnnnnnnnnnnnnnnnnnnnnnnnnnnnnnnnnnnnnnnnnnnnnnnnnnnnnnnnnnnnnnnnnnnnnnnnnnnnnnnnnnnnnnnnnnnnnnnnnnnnnnnnnnnnnnnnnnnnnnnnnnnnnnnnnnnnnnnnnnnnnnnnnnnnnnnnnnnnnnnnnnnnnnnnnnnnnnnnnnnnnnnnnnnnnnnnnnnnnnnnnnnnnnnnnnnnnnnnnnnnnnnnnnnnnnnnnnnnnnnnnnnnnnnnnnnnnnnnnnnnnnnnnnnnnnnnnnnnnnnnnnnnnnnnnnnnnnnnnnnnnnnnnnnnnnnnnnnnnnnnnnnnnnnnnnnnnnnnnnnnnnnnnnnnnnnnnnnnnnnnnnnnnnnnnnnnnnnnnnnnnnnnnnnnnnnnnnnnnnnnnnnnnnnnnnnnnnnnnnnnnnnnnnnnnnnnnnnnnnnnnnnnnnnnnnnnnnnnnnnnnnnnnnnnnnnnnnnnnnnnnnnnnnnnnnnnnnnnnnnnnnnnnnnnnnnnnnnnnnnnnnnnnnnnnnnnnnnnnnnnnnnnnnnnnnnnnnnnnnnnnnnnnnnnnnnnnnnnnnnnnnnnnnnnnnnnnnnnnnnnnnnnnnnnnnnnnnnnnnnnnnnnnnnnnnnnnnnnnnnnnnnnnnnnnnnnnnnnnnnnnnnnnnnnnnnnnnnnnnnnnnnnnnnnnnnnnnnnnnnnnnnnnnnnnnnnnnnnnnnnnnnnnnnnnnnnnnnnnnnnnnnnnnnnnnnnnnnnnnnnnnnnnnnnnnnnnnnnnnnnnnnnnnnnnnnnnnnnnnnnnnnnnnnnnnnnnnnnnnnnnnnnnnnnnnnnnnnnnnnnnnnnnnnnnnnnnnnnnnnnnnnnnnnnnnnnnnnnnnnnnnnnnnnnnnnnnnnnnnnnnnnnnnnnnnnnnnnnnnnnnnnnnnnnnnnnnnnnnnnnnnnnnnnnnnnnnnnnnnnnnnnnnnnnnnnnnnnnnnnnnnnnnnnnnnnnnnnnnnnnnnnnnnnnnnnnnnnnnnnnnnnnnnnnnnnnnnnnnnnnnnnnnnnnnnnnnnnnnnnnnnnnnnnnnnnnnnnnnnnnnnnnnnnnnnnnnnnnnnnnnnnnnnnnnnnnnnnnnnnnnnnnnnnnnnnnnnnnnnnnnnnnnnnnnnnnnnnnnnnnnnnnnnnnnnnnnnnnnnnnnnnnnnnnnnnnnnnnnnnnnnnnnnnnnnnnnnnnnnnnnnnnnnnnnnnnnnnnnnnnnnnnnnnnnnnnnnnnnnnnnnnnnnnnnnnnnnnnnnnnnnnnnnnnnnnnnnnnnnnnnnnnnnnnnnnnnnnnnnnnnnnnnnnnnnnnnnnnnnnnnnnnnnnnnnnnnnnnnnnnnnnnnnnnnnnnnnnnnnnnnnnnnnnnnnnnnnnnnnnnnnnnnnnnnnnnnnnnnnnnnnnnnnnnnnnnnnnnnnnnnnnnnnnnnnnnnnnnnnnnnnnnnnnnnnnnnnnnnnnnnnnnnnnnnnnnnnnnnnnnnnnnnnnnnnnnnnnnnnnnnnnnnnnnnnnnnnnnnnnnnnnnnnnnnnnnnnnnnnnnnnnnnnnnnnnnnnnnnnnnnnnnnnnnnnnnnnnnnnnnnnnnnnnnnnnnnnnnnnnnnnnnnnnnnnnnnnnnnnnnnnnnnnnnnnnnnnnnnnnnnnnnnnnnnnnnnnnnnnnnnnnnnnnnnnnnnnnnnnnnnnnnnnnnnnnnnnnnnnnnnnnnnnnnnnnnnnnnnnnnnnnnnnnnnnnnnnnnnnnnnnnnnnnnnnnnnnnnnnnnnnnnnnnnnnnnnnnnnnnnnnnnnnnnnnnnnnnnnnnnnnnnnnnnnnnnnnnnnnnnnnnnnnnnnnnnnnnnnnnnnnnnnnnnnnnnnnnnnnnnnnnnnnnnnnnnnnnnnnnnnnnnnnnnnnnnnnnnnnnnnnnnnnnnnnnnnnnnnnnnnnnnnnnnnnnnnnnnnnnnnnnnnnnnnnnnnnnnnnnnnnnnnnnnnnnnnnnnnnnnnnnnnnnnnnnnnnnnnnnnnnnnnnnnnnnnnnnnnnnnnnnnnnnnnnnnnnnnnnnnnnnnnnnnnnnnnnnnnnnnnnnnnnnnnnnnnnnnnnnnnnnnnnnnnnnnnnnnnnnnnnnnnnnnnnnnnnnnnnnnnnnnnnnnnnnnnnnnnnnnnnnnnnnnnnnnnnnnnnnnnnnnnnnnnnnnnnnnnnnnnnnnnnnnnnnnnnnnnnnnnnnnnnnnnnnnnnnnnnnnnnnnnnnnnnnnnnnnnnnnnnnnnnnnnnnnnnnnnnnnnnnnnnnnnnnnnnnnnnnnnnnnnnnnnnnnnnnnnnnnnnnnnnnnnnnnnnnnnnnnnnnnnnnnnnnnnnnnnnnnnnnnnnnnnnnnnnnnnnnnnnnnnnnnnnnnnnnnnnnnnnnnnnnnnnnnnnnnnnnnnnnnnnnnnnnnnnnnnnnnnnnnnnnnnnnnnnnnnnnnnnnnnnnnnnnnnnnnnnnnnnnnnnnnnnnnnnnnnnnnnnnnnnnnnnnnnnnnnnnnnnnnnnnnnnnnnnnnnnnnnnnnnnnnnnnnnnnnnnnnnnnnnnnnnnnnnnnnnnnnnnnnnnnnnnnnnnnnnnnnnnnnnnnnnnnnnnnnnnnnnnnnnnnnnnnnnnnnnnnnnnnnnnnnnnnnnnnnnnnnnnnnnnnnnnnnnnnnnnnnnnnnnnnnnnnnnnnnnnnnnnnnnnnnnnnnnnnnnnnnnnnnnnnnnnnnnnnnnnnnnnnnnnnnnnnnnnnnnnnnnnnnnnnnnnnnnnnnnnnnnnnnnnnnnnnnnnnnnnnnnnnnnnnnnnnnnnnnnnnnnnnnnnnnnnnnnnnnnnnnnnnnnnnnnnnnnnnnnnnnnnnnnnnnnnnnnnnnnnnnnnnnnnnnnnnnnnnnnnnnnnnnnnnnnnnnnnnnnnnnnnnnnnnnnnnnnnnnnnnnnnnnnnnnnnnnnnnnnnnnnnnnnnnnnnnnnnnnnnnnnnnnnnnnnnnnnnnnnnnnnnnnnnnnnnnnnnnnnnnnnnnnnnnnnnnnnnnnnnnnnnnnnnnnnnnnnnnnnnnnnnnnnnnnnnnnnnnnnnnnnnnnnnnnnnnnnnnnnnnnnnnnnnnnnnnnnnnnnnnnnnnnnnnnnnnnnnnnnnnnnnnnnnnnnnnnnnnnnnnnnnnnnnnnnnnnnnnnnnnnnnnnnnnnnnnnnnnnnnnnnnnnnnnnnnnnnnnnnnnnnnnnnnnnnnnnnnnnnnnnnnnnnnnnnnnnnnnnnnnnnnnnnnnnnnnnnnnnnnnnnnnnnnnnnnnnnnnnnnnnnnnnnnnnnnnnnnnnnnnnnnnnnnnnnnnnnnnnnnnnnnnnnnnnnnnnnnnnnnnnnnnnnnnnnnnnnnnnnnnnnnnnnnnnnnnnnnnnnnnnnnnnnnnnnnnnnnnnnnnnnnnnnnnnnnnnnnnnnnnnnnnnnnnnnnnnnnnnnnnnnnnnnnnnnnnnnnnnnnnnnnnnnnnnnnnnnnnnnnnnnnnnnnnnnnnnnnnnnnnnnnnnnnnnnnnnnnnnnnnnnnnnnnnnnnnnnnnnnnnnnnnnnnnnnnnnnnnnnnnnnnnnnnnnnnnnnnnnnnnnnnnnnnnnnnnnnnnnnnnnnnnnnnnnnnnnnnnnnnnnnnnnnnnnnnnnnnnnnnnnnnnnnnnnnnnnnnnnnnnnnnnnnnnnnnnnnnnnnnnnnnnnnnnnnnnnnnnnnnnnnnnnnnnnnnnnnnnnnnnnnnnnnnnnnnnnnnnnnnnnnnnnnnnnnnnnnnnnnnnnnnnnnnnnnnnnnnnnnnnnnnnnnnnnnnnnnnnnnnnnnnnnnnnnnnnnnnnnnnnnnnnnnnnnnnnnnnnnnnnnnnnnnnnnnnnnnnnnnnnnnnnnnnnnnnnnnnnnnnnnnnnnnnnnnnnnnnnnnnnnnnnnnnnnnnnnnnnnnnnnnnnnnnnnnnnnnnnnnnnnnnnnnnnnnnnnnnnnnnnnnnnnnnnnnnnnnnnnnnnnnnnnnnnnnnnnnnnnnnnnnnnnnnnnnnnnnnnnnnnnnnnnnnnnnnnnnnnnnnnnnnnnnnnnnnnnnnnnnnnnnnnnnnnnnnnnnnnnnnnnnnnnnnnnnnnnnnnnnnnnnnnnnnnnnnnnnnnnnnnnnnnnnnnnnnnnnnnnnnnnnnnnnnnnnnnnnnnnnnnnnnnnnnnnnnnnnnnnnnnnnnnnnnnnnnnnnnnnnnnnnnnnnnnnnnnnnnnnnnnnnnnnnnnnnnnnnnnnnnnnnnnnnnnnnnnnnnnnnnnnnnnnnnnnnnnnnnnnnnnnnnnnnnnnnnnnnnnnnnnnnnnnnnnnnnnnnnnnnnnnnnnnnnnnnnnnnnnnnnnnnnnnnnnnnnnnnnnnnnnnnnnnnnnnnnnnnnnnnnnnnnnnnnnnnnnnnnnnnnnnnnnnnnnnnnnnnnnnnnnnnnnnnnnnnnnnnnnnnnnnnnnnnnnnnnnnnnnnnnnnnnnnnnnnnnnnnnnnnnnnnnnnnnnnnnnnnnnnnnnnnnnnnnnnnnnnnnnnnnnnnnnnnnnnnnnnnnnnnnnnnnnnnnnnnnnnnnnnnnnnnnnnnnnnnnnnnnnnnnnnnnnnnnnnnnnnnnnnnnnnnnnnnnnnnnnnnnnnnnnnnnnnnnnnnnnnnnnnnnnnnnnnnnnnnnnnnnnnnnnnnnnnnnnnnnnnnnnnnnnnnnnnnnnnnnnnnnnnnnnnnnnnnnnnnnnnnnnnnnnnnnnnnnnnnnnnnnnnnnnnnnnnnnnnnnnnnnnnnnnnnnnnnnnnnnnnnnnnnnnnnnnnnnnnnnnnnnnnnnnnnnnnnnnnnnnnnnnnnnnnnnnnnnnnnnnnnnnnnnnnnnnnnnnnnnnnnnnnnnnnnnnnnnnnnnnnnnnnnnnnnnnnnnnnnnnnnnnnnnnnnnnnnnnnnnnnnnnnnnnnnnnnnnnnnnnnnnnnnnnnnnnnnnnnnnnnnnnnnnnnnnnnnnnnnnnnnnnnnnnnnnnnnnnnnnnnnnnnnnnnnnnnnnnnnnnnnnnnnnnnnnnnnnnnnnnnnnnnnnnnnnnnnnnnnnnnnnnnnnnnnnnnnnnnnnnnnnnnnnnnnnnnnnnnnnnnnnnnnnnnnnnnnnnnnnnnnnnnnnnnnnnnnnnnnnnnnnnnnnnnnnnnnnnnnnnnnnnnnnnnnnnnnnnnnnnnnnnnnnnnnnnnnnnnnnnnnnnnnnnnnnnnnnnnnnnnnnnnnnnnnnnnnnnnnnnnnnnnnnnnnnnnnnnnnnnnnnnnnnnnnnnnnnnnnnnnnnnnnnnnnnnnnnnnnnnnnnnnnnnnnnnnnnnnnnnnnnnnnnnnnnnnnnnnnnnnnnnnnnnnnnnnnnnnnnnnnnnnnnnnnnnnnnnnnnnnnnnnnnnnnnnnnnnnnnnnnnnnnnnnnnnnnnnnnnnnnnnnnnnnnnnnnnnnnnnnnnnnnnnnnnnnnnnnnnnnnnnnnnnnnnnnnnnnnnnnnnnnnnnnnnnnnnnnnnnnnnnnnnnnnnnnnnnnnnnnnnnnnnnnnnnnnnnnnnnnnnnnnnnnnnnnnnnnnnnnnnnnnnnnnnnnnnnnnnnnnnnnnnnnnnnnnnnnnnnnnnnnnnnnnnnnnnnnnnnnnnnnnnnnnnnnnnnnnnnnnnnnnnnnnnnnnnnnnnnnnnnnnnnnnnnnnnnnnnnnnnnnnnnnnnnnnnnnnnnnnnnnnnnnnnnnnnnnnnnnnnnnnnnnnnnnnnnnnnnnnnnnnnnnnnnnnnnnnnnnnnnnnnnnnnnnnnnnnnnnnnnnnnnnnnnnnnnnnnnnnnnnnnnnnnnnnnnnnnnnnnnnnnnnnnnnnnnnnnnnnnnnnnnnnnnnnnnnnnnnnnnnnnnnnnnnnnnnnnnnnnnnnnnnnnnnnnnnnnnnnnnnnnnnnnnnnnnnnnnnnnnnnnnnnnnnnnnnnnnnnnnnnnnnnnnnnnnnnnnnnnnnnnnnnnnnnnnnnnnnnnnnnnnnnnnnnnnnnnnnnnnnnnnnnnnnnnnnnnnnnnnnnnnnnnnnnnnnnnnnnnnnnnnnnnnnnnnnnnnnnnnnnnnnnnnnnnnnnnnnnnnnnnnnnnnnnnnnnnnnnnnnnnnnnnnnnnnnnnnnnnnnnnnnnnnnnnnnnnnnnnnnnnnnnnnnnnnnnnnnnnnnnnnnnnnnnnnnnnnnnnnnnnnnnnnnnnnnnnnnnnnnnnnnnnnnnnnnnnnnnnnnnnnnnnnnnnnnnnnnnnnnnnnnnnnnnnnnnnnnnnnnnnnnnnnnnnnnnnnnnnnnnnnnnnnnnnnnnnnnnnnnnnnnnnnnnnnnnnnnnnnnnnnnnnnnnnnnnnnnnnnnnnnnnnnnnnnnnnnnnnnnnnnnnnnnnnnnnnnnnnnnnnnnnnnnnnnnnnnnnnnnnnnnnnnnnnnnnnnnnnnnnnnnnnnnnnnnnnnnnnnnnnnnnnnnnnnnnnnnnnnnnnnnnnnnnnnnnnnnnnnnnnnnnnnnnnnnnnnnnnnnnnnnnnnnnnnnnnnnnnnnnnnnnnnnnnnnnnnnnnnnnnnnnnnnnnnnnnnnnnnnnnnnnnnnnnnnnnnnnnnnnnnnnnnnnnnnnnnnnnnnnnnnnnnnnnnnnnnnnnnnnnnnnnnnnnnnnnnnnnnnnnnnnnnnnnnnnnnnnnnnnnnnnnnnnnnnnnnnnnnnnnnnnnnnnnnnnnnnnnnnnnnnnnnnnnnnnnnnnnnnnnnnnnnnnnnnnnnnnnnnnnnnnnnnnnnnnnnnnnnnnnnnnnnnnnnnnnnnnnnnnnnnnnnnnnnnnnnnnnnnnnnnnnnnnnnnnnnnnnnnnnnnnnnnnnnnnnnnnnnnnnnnnnnnnnnnnnnnnnnnnnnnnnnnnnnnnnnnnnnnnnnnnnnnnnnnnnnnnnnnnnnnnnnnnnnnnnnnnnnnnnnnnnnnnnnnnnnnnnnnnnnnnnnnnnnnnnnnnnnnnnnnnnnnnnnnnnnnnnnnnnnnnnnnnnnnnnnnnnnnnnnnnnnnnnnnnnnnnnnnnnnnnnnnnnnnnnnnnnnnnnnnnnnnnnnnnnnnnnnnnnnnnnnnnnnnnnnnnnnnnnnnnnnnnnnnnnnnnnnnnnnnnnnnnnnnnnnnnnnnnnnnnnnnnnnnnnnnnnnnnnnnnnnnnnnnnnnnnnnnnnnnnnnnnnnnnnnnnnnnnnnnnnnnnnnnnnnnnnnnnnnnnnnnnnnnnnnnnnnnnnnnnnnnnnnnnnnnnnnnnnnnnnnnnnnnnnnnnnnnnnnnnnnnnnnnnnnnnnnnnnnnnnnnnnnnnnnnnnnnnnnnnnnnnnnnnnnnnnnnnnnnnnnnnnnnnnnnnnnnnnnnnnnnnnnnnnnnnnnnnnnnnnnnnnnnnnnnnnnnnnnnnnnnnnnnnnnnnnnnnnnnnnnnnnnnnnnnnnnnnnnnnnnnnnnnnnnnnnnnnnnnnnnnnnnnnnnnnnnnnnnnnnnnnnnnnnnnnnnnnnnnnnnnnnnnnnnnnnnnnnnnnnnnnnnnnnnnnnnnnnnnnnnnnnnnnnnnnnnnnnnnnnnnnnnnnnnnnnnnnnnnnnnnnnnnnnnnnnnnnnnnnnnnnnnnnnnnnnnnnnnnnnnnnnnnnnnnnnnnnnnnnnnnnnnnnnnnnnnnnnnnnnnnnnnnnnnnnnnnnnnnnnnnnnnnnnnnnnnnnnnnnnnnnnnnnnnnnnnnnnnnnnnnnnnnnnnnnnnnnnnnnnnnnnnnnnnnnnnnnnnnnnnnnnnnnnnnnnnnnnnnnnnnnnnnnnnnnnnnnnnnnnnnnnnnnnnnnnnnnnnnnnnnnnnnnnnnnnnnnnnnnnnnnnnnnnnnnnnnnnnnnnnnnnnnnnnnnnnnnnnnnnnnnnnnnnnnnnnnnnnnnnnnnnnnnnnnnnnnnnnnnnnnnnnnnnnnnnnnnnnnnnnnnnnnnnnnnnnnnnnnnnnnnnnnnnnnnnnnnnnnnnnnnnnnnnnnnnnnnnnnnnnnnnnnnnnnnnnnnnnnnnnnnnnnnnnnnnnnnnnnnnnnnnnnnnnnnnnnnnnnnnnnnnnnnnnnnnnnnnnnnnnnnnnnnnnnnnnnnnnnnnnnnnnnnnnnnnnnnnnnnnnnnnnnnnnnnnnnnnnnnnnnnnnnnnnnnnnnnnnnnnnnnnnnnnnnnnnnnnnnnnnnnnnnnnnnnnnnnnnnnnnnnnnnnnnnnnnnnnnnnnnnnnnnnnnnnnnnnnnnnnnnnnnnnnnnnnnnnnnnnnnnnnnnnnnnnnnnnnnnnnnnnnnnnnnnnnnnnnnnnnnnnnnnnnnnnnnnnnnnnnnnnnnnnnnnnnnnnnnnnnnnnnnnnnnnnnnnnnnnnnnnnnnnnnnnnnnnnnnnnnnnnnnnnnnnnnnnnnnnnnnnnnnnnnnnnnnnnnnnnnnnnnnnnnnnnnnnnnnnnnnnnnnnnnnnnnnnnnnnnnnnnnnnnnnnnnnnnnnnnnnnnnnnnnnnnnnnnnnnnnnnnnnnnnnnnnnnnnnnnnnnnnnnnnnnnnnnnnnnnnnnnnnnnnnnnnnnnnnnnnnnnnnnnnnnnnnnnnnnnnnnnnnnnnnnnnnnnnnnnnnnnnnnnnnnnnnnnnnnnnnnnnnnnnnnnnnnnnnnnnnnnnnnnnnnnnnnnnnnnnnnnnnnnnnnnnnnnnnnnnnnnnnnnnnnnnnnnnnnnnnnnnnnnnnnnnnnnnnnnnnnnnnnnnnnnnnnnnnnnnnnnnnnnnnnnnnnnnnnnnnnnnnnnnnnnnnnnnnnnnnnnnnnnnnnnnnnnnnnnnnnnnnnnnnnnnnnnnnnnnnnnnnnnnnnnnnnnnnnnnnnnnnnnnnnnnnnnnnnnnnnnnnnnnnnnnnnnnnnnnnnnnnnnnnnnnnnnnnnnnnnnnnnnnnnnnnnnnnnnnnnnnnnnnnnnnnnnnnnnnnnnnnnnnnnnnnnnnnnnnnnnnnnnnnnnnnnnnnnnnnnnnnnnnnnnnnnnnnnnnnnnnnnnnnnnnnnnnnnnnnnnnnnnnnnnnnnnnnnnnnnnnnnnnnnnnnnnnnnnnnnnnnnnnnnnnnnnnnnnnnnnnnnnnnnnnnnnnnnnnnnnnnnnnnnnnnnnnnnnnnnnnnnnnnnnnnnnnnnnnnnnnnnnnnnnnnnnnnnnnnnnnnnnnnnnnnnnnnnnnnnnnnnnnnnnnnnnnnnnnnnnnnnnnnnnnnnnnnnnnnnnnnnnnnnnnnnnnnnnnnnnnnnnnnnnnnnnnnnnnnnnnnnnnnnnnnnnnnnnnnnnnnnnnnnnnnnnnnnnnnnnnnnnnnnnnnnnnnnnnnnnnnnnnnnnnnnnnnnnnnnnnnnnnnnnnnnnnnnnnnnnnnnnnnnnnnnnnnnnnnnnnnnnnnnnnnnnnnnnnnnnnnnnnnnnnnnnnnnnnnnnnnnnnnnnnnnnnnnnnnnnnnnnnnnnnnnnnnnnnnnnnnnnnnnnnnnnnnnnnnnnnnnnnnnnnnnnnnnnnnnnnnnnnnnnnnnnnnnnnnnnnnnnnnnnnnnnnnnnnnnnnnnnnnnnnnnnnnnnnnnnnnnnnnnnnnnnnnnnnnnnnnnnnnnnnnnnnnnnnnnnnnnnnnnnnnnnnnnnnnnnnnnnnnnnnnnnnnnnnnnnnnnnnnnnnnnnnnnnnnnnnnnnnnnnnnnnnnnnnnnnnnnnnnnnnnnnnnnnnnnnnnnnnnnnnnnnnnnnnnnnnnnnnnnnnnnnnnnnnnnnnnnnnnnnnnnnnnnnnnnnnnnnnnnnnnnnnnnnnnnnnnnnnnnnnnnnnnnnnnnnnnnnnnnnnnnnnnnnnnnnnnnnnnnnnnnnnnnnnnnnnnnnnnnnnnnnnnnnnnnnnnnnnnnnnnnnnnnnnnnnnnnnnnnnnnnnnnnnnnnnnnnnnnnnnnnnnnnnnnnnnnnnnnnnnnnnnnnnnnnnnnnnnnnnnnnnnnnnnnnnnnnnnnnnnnnnnnnnnnnnnnnnnnnnnnnnnnnnnnnnnnnnnnnnnnnnnnnnnnnnnnnnnnnnnnnnnnnnnnnnnnnnnnnnnnnnnnnnnnnnnnnnnnnnnnnnnnnnnnnnnnnnnnnnnnnnnnnnnnnnnnnnnnnnnnnnnnnnnnnnnnnnnnnnnnnnnnnnnnnnnnnnnnnnnnnnnnnnnnnnnnnnnnnnnnnnnnnnnnnnnnnnnnnnnnnnnnnnnnnnnnnnnnnnnnnnnnnnnnnnnnnnnnnnnnnnnnnnnnnnnnnnnnnnnnnnnnnnnnnnnnnnnnnnnnnnnnnnnnnnnnnnnnnnnnnnnnnnnnnnnnnnnnnnnnnnnnnnnnnnnnnnnnnnnnnnnnnnnnnnnnnnnnnnnnnnnnnnnnnnnnnnnnnnnnnnnnnnnnnnnnnnnnnnnnnnnnnnnnnnnnnnnnnnnnnnnnnnnnnnnnnnnnnnnnnnnnnnnnnnnnnnnnnnnnnnnnnnnnnnnnnnnnnnnnnnnnnnnnnnnnnnnnnnnnnnnnnnnnnnnnnnnnnnnnnnnnnnnnnnnnnnnnnnnnnnnnnnnnnnnnnnnnnnnnnnnnnnnnnnnnnnnnnnnnnnnnnnnnnnnnnnnnnnnnnnnnnnnnnnnnnnnnnnnnnnnnnnnnnnnnnnnnnnnnnnnnnnnnnnnnnnnnnnnnnnnnnnnnnnnnnnnnnnnnnnnnnnnnnnnnnnnnnnnnnnnnnnnnnnnnnnnnnnnnnnnnnnnnnnnnnnnnnnnnnnnnnnnnnnnnnnnnnnnnnnnnnnnnnnnnnnnnnnnnnnnnnnnnnnnnnnnnnnnnnnnnnnnnnnnnnnnnnnnnnnnnnnnnnnnnnnnnnnnnnnnnnnnnnnnnnnnnnnnnnnnnnnnnnnnnnnnnnnnnnnnnnnnnnnnnnnnnnnnnnnnnnnnnnnnnnnnnnnnnnnnnnnnnnnnnnnnnnnnnnnnnnnnnnnnnnnnnnnnnnnnnnnnnnnnnnnnnnnnnnnnnnnnnnnnnnnnnnnnnnnnnnnnnnnnnnnnnnnnnnnnnnnnnnnnnnnnnnnnnnnnnnnnnnnnnnnnnnnnnnnnnnnnnnnnnnnnnnnnnnnnnnnnnnnnnnnnnnnnnnnnnnnnnnnnnnnnnnnnnnnnnnnnnnnnnnnnnnnnnnnnnnnnnnnnnnnnnnnnnnnnnnnnnnnnnnnnnnnnnnnnnnnnnnnnnnnnnnnnnnnnnnnnnnnnnnnnnnnnnnnnnnnnnnnnnnnnnnnnnnnnnnnnnnnnnnnnnnnnnnnnnnnnnnnnnnnnnnnnnnnnnnnnnnnnnnnnnnnnnnnnnnnnnnnnnnnnnnnnnnnnnnnnnnnnnnnnnnnnnnnnnnnnnnnnnnnnnnnnnnnnnnnnnnnnnnnnnnnnnnnnnnnnnnnnnnnnnnnnnnnnnnnnnnnnnnnnnnnnnnnnnnnnnnnnnnnnnnnnnnnnnnnnnnnnnnnnnnnnnnnnnnnnnnnnnnnnnnnnnnnnnnnnnnnnnnnnnnnnnnnnnnnnnnnnnnnnnnnnnnnnnnnnnnnnnnnnnnnnnnnnnnnnnnnnnnnnnnnnnnnnnnnnnnnnnnnnnnnnnnnnnnnnnnnnnnnnnnnnnnnnnnnnnnnnnnnnnnnnnnnnnnnnnnnnnnnnnnnnnnnnnnnnnnnnnnnnnnnnnnnnnnnnnnnnnnnnnnnnnnnnnnnnnnnnnnnnnnnnnnnnnnnnnnnnnnnnnnnnnnnnnnnnnnnnnnnnnnnnnnnnnnnnnnnnnnnnnnnnnnnnnnnnnnnnnnnnnnnnnnnnnnnnnnnnnnnnnnnnnnnnnnnnnnnnnnnnnnnnnnnnnnnnnnnnnnnnnnnnnnnnnnnnnnnnnnnnnnnnnnnnnnnnnnnnnnnnnnnnnnnnnnnnnnnnnnnnnnnnnnnnnnnnnnnnnnnnnnnnnnnnnnnnnnnnnnnnnnnnnnnnnnnnnnnnnnnnnnnnnnnnnnnnnnnnnnnnnnnnnnnnnnnnnnnnnnnnnnnnnnnnnnnnnnnnnnnnnnnnnnnnnnnnnnnnnnnnnnnnnnnnnnnnnnnnnnnnnnnnnnnnnnnnnnnnnnnnnnnnnnnnnnnnnnnnnnnnnnnnnnnnnnnnnnnnnnnnnnnnnnnnnnnnnnnnnnnnnnnnnnnnnnnnnnnnnnnnnnnnnnnnnnnnnnnnnnnnnnnnnnnnnnnnnnnnnnnnnnnnnnnnnnnnnnnnnnnnnnnnnnnnnnnnnnnnnnnnnnnnnnnnnnnnnnnnnnnnnnnnnnnnnnnnnnnnnnnnnnnnnnnnnnnnnnnnnnnnnnnnnnnnnnnnnnnnnnnnnnnnnnnnnnnnnnnnnnnnnnnnnnnnnnnnnnnnnnnnnnnnnnnnnnnnnnnnnnnnnnnnnnnnnnnnnnnnnnnnnnnnnnnnnnnnnnnnnnnnnnnnnnnnnnnnnnnnnnnnnnnnnnnnnnnnnnnnnnnnnnnnnnnnnnnnnnnnnnnnnnnnnnnnnnnnnnnnnnnnnnnnnnnnnnnnnnnnnnnnnnnnnnnnnnnnnnnnnnnnnnnnnnnnnnnnnnnnnnnnnnnnnnnnnnnnnnnnnnnnnnnnnnnnnnnnnnnnnnnnnnnnnnnnnnnnnnnnnnnnnnnnnnnnnnnnnnnnnnnnnnnnnnnnnnnnnnnnnnnnnnnnnnnnnnnnnnnnnnnnnnnnnnnnnnnnnnnnnnnnnnnnnnnnnnnnnnnnnnnnnnnnnnnnnnnnnnnnnnnnnnnnnnnnnnnnnnnnnnnnnnnnnnnnnnnnnnnnnnnnnnnnnnnnnnnnnnnnnnnnnnnnnnnnnnnnnnnnnnnnnnnnnnnnnnnnnnnnnnnnnnnnnnnnnnnnnnnnnnnnnnnnnnnnnnnnnnnnnnnnnnnnnnnnnnnnnnnnnnnnnnnnnnnnnnnnnnnnnnnnnnnnnnnnnnnnnnnnnnnnnnnnnnnnnnnnnnnnnnnnnnnnnnnnnnnnnnnnnnnnnnnnnnnnnnnnnnnnnnnnnnnnnnnnnnnnnnnnnnnnnnnnnnnnnnnnnnnnnnnnnnnnnnnnnnnnnnnnnnnnnnnnnnnnnnnnnnnnnnnnnnnnnnnnnnnnnnnnnnnnnnnnnnnnnnnnnnnnnnnnnnnnnnnnnnnnnnnnnnnnnnnnnnnnnnnnnnnnnnnnnnnnnnnnnnnnnnnnnnnnnnnnnnnnnnnnnnnnnnnnnnnnnnnnnnnnnnnnnnnnnnnnnnnnnnnnnnnnnnnnnnnnnnnnnnnnnnnnnnnnnnnnnnnnnnnnnnnnnnnnnnnnnnnnnnnnnnnnnnnnnnnnnnnnnnnnnnnnnnnnnnnnnnnnnnnnnnnnnnnnnnnnnnnnnnnnnnnnnnnnnnnnnnnnnnnnnnnnnnnnnnnnnnnnnnnnnnnnnnnnnnnnnnnnnnnnnnnnnnnnnnnnnnnnnnnnnnnnnnnnnnnnnnnnnnnnnnnnnnnnnnnnnnnnnnnnnnnnnnnnnnnnnnnnnnnnnnnnnnnnnnnnnnnnnnnnnnnnnnnnnnnnnnnnnnnnnnnnnnnnnnnnnnnnnnnnnnnnnnnnnnnnnnnnnnnnnnnnnnnnnnnnnnnnnnnnnnnnnnnnnnnnnnnnnnnnnnnnnnnnnnnnnnnnnnnnnnnnnnnnnnnnnnnnnnnnnnnnnnnnnnnnnnnnnnnnnnnnnnnnnnnnnnnnnnnnnnnnnnnnnnnnnnnnnnnnnnnnnnnnnnnnnnnnnnnnnnnnnnnnnnnnnnnnnnnnnnnnnnnnnnnnnnnnnnnnnnnnnnnnnnnnnnnnnnnnnnnnnnnnnnnnnnnnnnnnnnnnnnnnnnnnnnnnnnnnnnnnnnnnnnnnnnnnnnnnnnnnnnnnnnnnnnnnnnnnnnnnnnnnnnnnnnnnnnnnnnnnnnnnnnnnnnnnnnnnnnnnnnnnnnnnnnnnnnnnnnnnnnnnnnnnnnnnnnnnnnnnnnnnnnnnnnnnnnnnnnnnnnnnnnnnnnnnnnnnnnnnnnnnnnnnnnnnnnnnnnnnnnnnnnnnnnnnnnnnnnnnnnnnnnnnnnnnnnnnnnnnnnnnnnnnnnnnnnnnnnnnnnnnnnnnnnnnnnnnnnnnnnnnnnnnnnnnnnnnnnnnnnnnnnnnnnnnnnnnnnnnnnnnnnnnnnnnnnnnnnnnnnnnnnnnnnnnnnnnnnnnnnnnnnnnnnnnnnnnnnnnnnnnnnnnnnnnnnnnnnnnnnnnnnnnnnnnnnnnnnnnnnnnnnnnnnnnnnnnnnnnnnnnnnnnnnnnnnnnnnnnnnnnnnnnnnnnnnnnnnnnnnnnnnnnnnnnnnnnnnnnnnnnnnnnnnnnnnnnnnnnnnnnnnnnnnnnnnnnnnnnnnnnnnnnnnnnnnnnnnnnnnnnnnnnnnnnnnnnnnnnnnnnnnnnnnnnnnnnnnnnnnnnnnnnnnnnnnnnnnnnnnnnnnnnnnnnnnnnnnnnnnnnnnnnnnnnnnnnnnnnnnnnnnnnnnnnnnnnnnnnnnnnnnnnnnnnnnnnnnnnnnnnnnnnnnnnnnnnnnnnnnnnnnnnnnnnnnnnnnnnnnnnnnnnnnnnnnnnnnnnnnnnnnnnnnnnnnnnnnnnnnnnnnnnnnnnnnnnnnnnnnnnnnnnnnnnnnnnnnnnnnnnnnnnnnnnnnnnnnnnnnnnnnnnnnnnnnnnnnnnnnnnnnnnnnnnnnnnnnnnnnnnnnnnnnnnnnnnnnnnnnnnnnnnnnnnnnnnnnnnnnnnnnnnnnnnnnnnnnnnnnnnnnnnnnnnnnnnnnnnnnnnnnnnnnnnnnnnnnnnnnnnnnnnnnnnnnnnnnnnnnnnnnnnnnnnnnnnnnnnnnnnnnnnnnnnnnnnnnnnnnnnnnnnnnnnnnnnnnnnnnnnnnnnnnnnnnnnnnnnnnnnnnnnnnnnnnnnnnnnnnnnnnnnnnnnnnnnnnnnnnnnnnnnnnnnnnnnnnnnnnnnnnnnnnnnnnnnnnnnnnnnnnnnnnnnnnnnnnnnnnnnnnnnnnnnnnnnnnnnnnnnnnnnnnnnnnnnnnnnnnnnnnnnnnnnnnnnnnnnnnnnnnnnnnnnnnnnnnnnnnnnnnnnnnnnnnnnnnnnnnnnnnnnnnnnnnnnnnnnnnnnnnnnnnnnnnnnnnnnnnnnnnnnnnnnnnnnnnnnnnnnnnnnnnnnnnnnnnnnnnnnnnnnnnnnnnnnnnnnnnnnnnnnnnnnnnnnnnnnnnnnnnnnnnnnnnnnnnnnnnnnnnnnnnnnnnnnnnnnnnnnnnnnnnnnnnnnnnnnnnnnnnnnnnnnnnnnnnnnnnnnnnnnnnnnnnnnnnnnnnnnnnnnnnnnnnnnnnnnnnnnnnnnnnnnnnnnnnnnnnnnnnnnnnnnnnnnnnnnnnnnnnnnnnnnnnnnnnnnnnnnnnnnnnnnnnnnnnnnnnnnnnnnnnnnnnnnnnnnnnnnnnnnnnnnnnnnnnnnnnnnnnnnnnnnnnnnnnnnnnnnnnnnnnnnnnnnnnnnnnnnnnnnnnnnnnnnnnnnnnnnnnnnnnnnnnnnnnnnnnnnnnnnnnnnnnnnnnnnnnnnnnnnnnnnnnnnnnnnnnnnnnnnnnnnnnnnnnnnnnnnnnnnnnnnnnnnnnnnnnnnnnnnnnnnnnnnnnnnnnnnnnnnnnnnnnnnnnnnnnnnnnnnnnnnnnnnnnnnnnnnnnnnnnnnnnnnnnnnnnnnnnnnnnnnnnnnnnnnnnnnnnnnnnnnnnnnnnnnnnnnnnnnnnnnnnnnnnnnnnnnnnnnnnnnnnnnnnnnnnnnnnnnnnnnnnnnnnnnnnnnnnnnnnnnnnnnnnnnnnnnnnnnnnnnnnnnnnnnnnnnnnnnnnnnnnnnnnnnnnnnnnnnnnnnnnnnnnnnnnnnnnnnnnnnnnnnnnnnnnnnnnnnnnnnnnnnnnnnnnnnnnnnnnnnnnnnnnnnnnnnnnnnnnnnnnnnnnnnnnnnnnnnnnnnnnnnnnnnnnnnnnnnnnnnnnnnnnnnnnnnnnnnnnnnnnnnnnnnnnnnnnnnnnnnnnnnnnnnnnnnnnnnnnnnnnnnnnnnnnnnnnnnnnnnnnnnnnnnnnnnnnnnnnnnnnnnnnnnnnnnnnnnnnnnnnnnnnnnnnnnnnnnnnnnnnnnnnnnnnnnnnnnnnnnnnnnnnnnnnnnnnnnnnnnnnnnnnnnnnnnnnnnnnnnnnnnnnnnnnnnnnnnnnnnnnnnnnnnnnnnnnnnnnnnnnnnnnnnnnnnnnnnnnnnnnnnnnnnnnnnnnnnnnnnnnnnnnnnnnnnnnnnnnnnnnnnnnnnnnnnnnnnnnnnnnnnnnnnnnnnnnnnnnnnnnnnnnnnnnnnnnnnnnnnnnnnnnnnnnnnnnnnnnnnnnnnnnnnnnnnnnnnnnnnnnnnnnnnnnnnnnnnnnnnnnnnnnnnnnnnnnnnnnnnnnnnnnnnnnnnnnnnnnnnnnnnnnnnnnnnnnnnnnnnnnnnnnnnnnnnnnnnnnnnnnnnnnnnnnnnnnnnnnnnnnnnnnnnnnnnnnnnnnnnnnnnnnnnnnnnnnnnnnnnnnnnnnnnnnnnnnnnnnnnnnnnnnnnnnnnnnnnnnnnnnnnnnnnnnnnnnnnnnnnnnnnnnnnnnnnnnnnnnnnnnnnnnnnnnnnnnnnnnnnnnnnnnnnnnnnnnnnnnnnnnnnnnnnnnnnnnnnnnnnnnnnnnnnnnnnnnnnnnnnnnnnnnnnnnnnnnnnnnnnnnnnnnnnnnnnnnnnnnnnnnnnnnnnnnnnnnnnnnnnnnnnnnnnnnnnnnnnnnnnnnnnnnnnnnnnnnnnnnnnnnnnnnnnnnnnnnnnnnnnnnnnnnnnnnnnnnnnnnnnnnnnnnnnnnnnnnnnnnnnnnnnnnnnnnnnnnnnnnnnnnnnnnnnnnnnnnnnnnnnnnnnnnnnnnnnnnnnnnnnnnnnnnnnnnnnnnnnnnnnnnnnnnnnnnnnnnnnnnnnnnnnnnnnnnnnnnnnnnnnnnnnnnnnnnnnnnnnnnnnnnnnnnnnnnnnnnnnnnnnnnnnnnnnnnnnnnnnnnnnnnnnnnnnnnnnnnnnnnnnnnnnnnnnnnnnnnnnnnnnnnnnnnnnnnnnnnnnnnnnnnnnnnnnnnnnnnnnnnnnnnnnnnnnnnnnnnnnnnnnnnnnnnnnnnnnnnnnnnnnnnnnnnnnnnnnnnnnnnnnnnnnnnnnnnnnnnnnnnnnnnnnnnnnnnnnnnnnnnnnnnnnnnnnnnnnnnnnnnnnnnnnnnnnnnnnnnnnnnnnnnnnnnnnnnnnnnnnnnnnnnnnnnnnnnnnnnnnnnnnnnnnnnnnnnnnnnnnnnnnnnnnnnnnnnnnnnnnnnnnnnnnnnnnnnnnnnnnnnnnnnnnnnnnnnnnnnnnnnnnnnnnnnnnnnnnnnnnnnnnnnnnnnnnnnnnnnnnnnnnnnnnnnnnnnnnnnnnnnnnnnnnnnnnnnnnnnnnnnnnnnnnnnnnnnnnnnnnnnnnnnnnnnnnnnnnnnnnnnnnnnnnnnnnnnnnnnnnnnnnnnnnnnnnnnnnnnnnnnnnnnnnnnnnnnnnnnnnnnnnnnnnnnnnnnnnnnnnnnnnnnnnnnnnnnnnnnnnnnnnnnnnnnnnnnnnnnnnnnnnnnnnnnnnnnnnnnnnnnnnnnnnnnnnnnnnnnnnnnnnnnnnnnnnnnnnnnnnnnnnnnnnnnnnnnnnnnnnnnnnnnnnnnnnnnnnnnnnnnnnnnnnnnnnnnnnnnnnnnnnnnnnnnnnnnnnnnnnnnnnnnnnnnnnnnnnnnnnnnnnnnnnnnnnnnnnnnnnnnnnnnnnnnnnnnnnnnnnnnnnnnnnnnnnnnnnnnnnnnnnnnnnnnnnnnnnnnnnnnnnnnnnnnnnnnnnnnnnnnnnnnnnnnnnnnnnnnnnnnnnnnnnnnnnnnnnnnnnnnnnnnnnnnnnnnnnnnnnnnnnnnnnnnnnnnnnnnnnnnnnnnnnnnnnnnnnnnnnnnnnnnnnnnnnnnnnnnnnnnnnnnnnnnnnnnnnnnnnnnnnnnnnnnnnnnnnnnnnnnnnnnnnnnnnnnnnnnnnnnnnnnnnnnnnnnnnnnnnnnnnnnnnnnnnnnnnnnnnnnnnnnnnnnnnnnnnnnnnnnnnnnnnnnnnnnnnnnnnnnnnnnnnnnnnnnnnnnnnnnnnnnnnnnnnnnnnnnnnnnnnnnnnnnnnnnnnnnnnnnnnnnnnnnnnnnnnnnnnnnnnnnnnnnnnnnnnnnnnnnnnnnnnnnnnnnnnnnnnnnnnnnnnnnnnnnnnnnnnnnnnnnnnnnnnnnnnnnnnnnnnnnnnnnnnnnnnnnnnnnnnnnnnnnnnnnnnnnnnnnnnnnnnnnnnnnnnnnnnnnnnnnnnnnnnnnnnnnnnnnnnnnnnnnnnnnnnnnnnnnnnnnnnnnnnnnnnnnnnnnnnnnnnnnnnnnnnnnnnnnnnnnnnnnnnnnnnnnnnnnnnnnnnnnnnnnnnnnnnnnnnnnnnnnnnnnnnnnnnnnnnnnnnnnnnnnnnnnnnnnnnnnnnnnnnnnnnnnnnnnnnnnnnnnnnnnnnnnnnnnnnnnnnnnnnnnnnnnnnnnnnnnnnnnnnnnnnnnnnnnnnnnnnnnnnnnnnnnnnnnnnnnnnnnnnnnnnnnnnnnnnnnnnnnnnnnnnnnnnnnnnnnnnnnnnnnnnnnnnnnnnnnnnnnnnnnnnnnnnnnnnnnnnnnnnnnnnnnnnnnnnnnnnnnnnnnnnnnnnnnnnnnnnnnnnnnnnnnnnnnnnnnnnnnnnnnnnnnnnnnnnnnnnnnnnnnnnnnnnnnnnnnnnnnnnnnnnnnnnnnnnnnnnnnnnnnnnnnnnnnnnnnnnnnnnnnnnnnnnnnnnnnnnnnnnnnnnnnnnnnnnnnnnnnnnnnnnnnnnnnnnnnnnnnnnnnnnnnnnnnnnnnnnnnnnnnnnnnnnnnnnnnnnnnnnnnnnnnnnnnnnnnnnnnnnnnnnnnnnnnnnnnnnnnnnnnnnnnnnnnnnnnnnnnnnnnnnnnnnnnnnnnnnnnnnnnnnnnnnnnnnnnnnnnnnnnnnnnnnnnnnnnnnnnnnnnnnnnnnnnnnnnnnnnnnnnnnnnnnnnnnnnnnnnnnnnnnnnnnnnnnnnnnnnnnnnnnnnnnnnnnnnnnnnnnnnnnnnnnnnnnnnnnnnnnnnnnnnnnnnnnnnnnnnnnnnnnnnnnnnnnnnnnnnnnnnnnnnnnnnnnnnnnnnnnnnnnnnnnnnnnnnnnnnnnnnnnnnnnnnnnnnnnnnnnnnnnnnnnnnnnnnnnnnnnnnnnnnnnnnnnnnnnnnnnnnnnnnnnnnnnnnnnnnnnnnnnnnnnnnnnnnnnnnnnnnnnnnnnnnnnnnnnnnnnnnnnnnnnnnnnnnnnnnnnnnnnnnnnnnnnnnnnnnnnnnnnnnnnnnnnnnnnnnnnnnnnnnnnnnnnnnnnnnnnnnnnnnnnnnnnnnnnnnnnnnnnnnnnnnnnnnnnnnnnnnnnnnnnnnnnnnnnnnnnnnnnnnnnnnnnnnnnnnnnnnnnnnnnnnnnnnnnnnnnnnnnnnnnnnnnnnnnnnnnnnnnnnnnnnnnnnnnnnnnnnnnnnnnnnnnnnnnnnnnnnnnnnnnnnnnnnnnnnnnnnnnnnnnnnnnnnnnnnnnnnnnnnnnnnnnnnnnnnnnnnnnnnnnnnnnnnnnnnnnnnnnnnnnnnnnnnnnnnnnnnnnnnnnnnnnnnnnnnnnnnnnnnnnnnnnnnnnnnnnnnnnnnnnnnnnnnnnnnnnnnnnnnnnnnnnnnnnnnnnnnnnnnnnnnnnnnnnnnnnnnnnnnnnnnnnnnnnnnnnnnnnnnnnnnnnnnnnnnnnnnnnnnnnnnnnnnnnnnnnnnnnnnnnnnnnnnnnnnnnnnnnnnnnnnnnnnnnnnnnnnnnnnnnnnnnnnnnnnnnnnnnnnnnnnnnnnnnnnnnnnnnnnnnnnnnnnnnnnnnnnnnnnnnnnnnnnnnnnnnnnnnnnnnnnnnnnnnnnnnnnnnnnnnnnnnnnnnnnnnnnnnnnnnnnnnnnnnnnnnnnnnnnnnnnnnnnnnnnnnnnnnnnnnnnnnnnnnnnnnnnnnnnnnnnnnnnnnnnnnnnnnnnnnnnnnnnnnnnnnnnnnnnnnnnnnnnnnnnnnnnnnnnnnnnnnnnnnnnnnnnnnnnnnnnnnnnnnnnnnnnnnnnnnnnnnnnnnnnnnnnnnnnnnnnnnnnnnnnnnnnnnnnnnnnnnnnnnnnnnnnnnnnnnnnnnnnnnnnnnnnnnnnnnnnnnnnnnnnnnnnnnnnnnnnnnnnnnnnnnnnnnnnnnnnnnnnnnnnnnnnnnnnnnnnnnnnnnnnnnnnnnnnnnnnnnnnnnnnnnnnnnnnnnnnnnnnnnnnnnnnnnnnnnnnnnnnnnnnnnnnnnnnnnnnnnnnnnnnnnnnnnnnnnnnnnnnnnnnnnnnnnnnnnnnnnnnnnnnnnnnnnnnnnnnnnnnnnnnnnnnnnnnnnnnnnnnnnnnnnnnnnnnnnnnnnnnnnnnnnnnnnnnnnnnnnnnnnnnnnnnnnnnnnnnnnnnnnnnnnnnnnnnnnnnnnnnnnnnnnnnnnnnnnnnnnnnnnnnnnnnnnnnnnnnnnnnnnnnnnnnnnnnnnnnnnnnnnnnnnnnnnnnnnnnnnnnnnnnnnnnnnnnnnnnnnnnnnnnnnnnnnnnnnnnnnnnnnnnnnnnnnnnnnnnnnnnnnnnnnnnnnnnnnnnnnnnnnnnnnnnnnnnnnnnnnnnnnnnnnnnnnnnnnnnnnnnnnnnnnnnnnnnnnnnnnnnnnnnnnnnnnnnnnnnnnnnnnnnnnnnnnnnnnnnnnnnnnnnnnnnnnnnnnnnnnnnnnnnnnnnnnnnnnnnnnnnnnnnnnnnnnnnnnnnnnnnnnnnnnnnnnnnnnnnnnnnnnnnnnnnnnnnnnnnnnnnnnnnnnnnnnnnnnnnnnnnnnnnnnnnnnnnnnnnnnnnnnnnnnnnnnnnnnnnnnnnnnnnnnnnnnnnnnnnnnnnnnnnnnnnnnnnnnnnnnnnnnnnnnnnnnnnnnnnnnnnnnnnnnnnnnnnnnnnnnnnnnnnnnnnnnnnnnnnnnnnnnnnnnnnnnnnnnnnnnnnnnnnnnnnnnnnnnnnnnnnnnnnnnnnnnnnnnnnnnnnnnnnnnnnnnnnnnnnnnnnnnnnnnnnnnnnnnnnnnnnnnnnnnnnnnnnnnnnnnnnnnnnnnnnnnnnnnnnnnnnnnnnnnnnnnnnnnnnnnnnnnnnnnnnnnnnnnnnnnnnnnnnnnnnnnnnnnnnnnnnnnnnnnnnnnnnnnnnnnnnnnnnnnnnnnnnnnnnnnnnnnnnnnnnnnnnnnnnnnnnnnnnnnnnnnnnnnnnnnnnnnnnnnnnnnnnnnnnnnnnnnnnnnnnnnnnnnnnnnnnnnnnnnnnnnnnnnnnnnnnnnnnnnnnnnnnnnnnnnnnnnnnnnnnnnnnnnnnnnnnnnnnnnnnnnnnnnnnnnnnnnnnnnnnnnnnnnnnnnnnnnnnnnnnnnnnnnnnnnnnnnnnnnnnnnnnnnnnnnnnnnnnnnnnnnnnnnnnnnnnnnnnnnnnnnnnnnnnnnnnnnnnnnnnnnnnnnnnnnnnnnnnnnnnnnnnnnnnnnnnnnnnnnnnnnnnnnnnnnnnnnnnnnnnnnnnnnnnnnnnnnnnnnnnnnnnnnnnnnnnnnnnnnnnnnnnnnnnnnnnnnnnnnnnnnnnnnnnnnnnnnnnnnnnnnnnnnnnnnnnnnnnnnnnnnnnnnnnnnnnnnnnnnnnnnnnnnnnnnnnnnnnnnnnnnnnnnnnnnnnnnnnnnnnnnnnnnnnnnnnnnnnnnnnnnnnnnnnnnnnnnnnnnnnnnnnnnnnnnnnnnnnnnnnnnnnnnnnnnnnnnnnnnnnnnnnnnnnnnnnnnnnnnnnnnnnnnnnnnnnnnnnnnnnnnnnnnnnnnnnnnnnnnnnnnnnnnnnnnnnnnnnnnnnnnnnnnnnnnnnnnnnnnnnnnnnnnnnnnnnnnnnnnnnnnnnnnnnnnnnnnnnnnnnnnnnnnnnnnnnnnnnnnnnnnnnnnnnnnnnnnnnnnnnnnnnnnnnnnnnnnnnnnnnnnnnnnnnnnnnnnnnnnnnnnnnnnnnnnnnnnnnnnnnnnnnnnnnnnnnnnnnnnnnnnnnnnnnnnnnnnnnnnnnnnnnnnnnnnnnnnnnnnnnnnnnnnnnnnnnnnnnnnnnnnnnnnnnnnnnnnnnnnnnnnnnnnnnnnnnnnnnnnnnnnnnnnnnnnnnnnnnnnnnnnnnnnnnnnnnnnnnnnnnnnnnnnnnnnnnnnnnnnnnnnnnnnnnnnnnnnnnnnnnnnnnnnnnnnnnnnnnnnnnnnnnnnnnnnnnnnnnnnnnnnnnnnnnnnnnnnnnnnnnnnnnnnnnnnnnnnnnnnnnnnnnnnnnnnnnnnnnnnnnnnnnnnnnnnnnnnnnnnnnnnnnnnnnnnnnnnnnnnnnnnnnnnnnnnnnnnnnnnnnnnnnnnnnnnnnnnnnnnnnnnnnnnnnnnnnnnnnnnnnnnnnnnnnnnnnnnnnnnnnnnnnnnnnnnnnnnnnnnnnnnnnnnnnnnnnnnnnnnnnnnnnnnnnnnnnnnnnnnnnnnnnnnnnnnnnnnnnnnnnnnnnnnnnnnnnnnnnnnnnnnnnnnnnnnnnnnnnnnnnnnnnnnnnnnnnnnnnnnnnnnnnnnnnnnnnnnnnnnnnnnnnnnnnnnnnnnnnnnnnnnnnnnnnnnnnnnnnnnnnnnnnnnnnnnnnnnnnnnnnnnnnnnnnnnnnnnnnnnnnnnnnnnnnnnnnnnnnnnnnnnnnnnnnnnnnnnnnnnnnnnnnnnnnnnnnnnnnnnnnnnnnnnnnnnnnnnnnnnnnnnnnnnnnnnnnnnnnnnnnnnnnnnnnnnnnnnnnnnnnnnnnnnnnnnnnnnnnnnnnnnnnnnnnnnnnnnnnnnnnnnnnnnnnnnnnnnnnnnnnnnnnnnnnnnnnnnnnnnnnnnnnnnnnnnnnnnnnnnnnnnnnnnnnnnnnnnnnnnnnnnnnnnnnnnnnnnnnnnnnnnnnnnnnnnnnnnnnnnnnnnnnnnnnnnnnnnnnnnnnnnnnnnnnnnnnnnnnnnnnnnnnnnnnnnnnnnnnnnnnnnnnnnnnnnnnnnnnnnnnnnnnnnnnnnnnnnnnnnnnnnnnnnnnnnnnnnnnnnnnnnnnnnnnnnnnnnnnnnnnnnnnnnnnnnnnnnnnnnnnnnnnnnnnnnnnnnnnnnnnnnnnnnnnnnnnnnnnnnnnnnnnnnnnnnnnnnnnnnnnnnnnnnnnnnnnnnnnnnnnnnnnnnnnnnnnnnnnnnnnnnnnnnnnnnnnnnnnnnnnnnnnnnnnnnnnnnnnnnnnnnnnnnnnnnnnnnnnnnnnnnnnnnnnnnnnnnnnnnnnnnnnnnnnnnnnnnnnnnnnnnnnnnnnnnnnnnnnnnnnnnnnnnnnnnnnnnnnnnnnnnnnnnnnnnnnnnnnnnnnnnnnnnnnnnnnnnnnnnnnnnnnnnnnnnnnnnnnnnnnnnnnnnnnnnnnnnnnnnnnnnnnnnnnnnnnnnnnnnnnnnnnnnnnnnnnnnnnnnnnnnnnnnnnnnnnnnnnnnnnnnnnnnnnnnnnnnnnnnnnnnnnnnnnnnnnnnnnnnnnnnnnnnnnnnnnnnnnnnnnnnnnnnnnnnnnnnnnnnnnnnnnnnnnnnnnnnnnnnnnnnnnnnnnnnnnnnnnnnnnnnnnnnnnnnnnnnnnnnnnnnnnnnnnnnnnnnnnnnnnnnnnnnnnnnnnnnnnnnnnnnnnnnnnnnnnnnnnnnnnnnnnnnnnnnnnnnnnnnnnnnnnnnnnnnnnnnnnnnnnnnnnnnnnnnnnnnnnnnnnnnnnnnnnnnnnnnnnnnnnnnnnnnnnnnnnnnnnnnnnnnnnnnnnnnnnnnnnnnnnnnnnnnnnnnnnnnnnnnnnnnnnnnnnnnnnnnnnnnnnnnnnnnnnnnnnnnnnnnnnnnnnnnnnnnnnnnnnnnnnnnnnnnnnnnnnnnnnnnnnnnnnnnnnnnnnnnnnnnnnnnnnnnnnnnnnnnnnnnnnnnnnnnnnnnnnnnnnnnnnnnnnnnnnnnnnnnnnnnnnnnnnnnnnnnnnnnnnnnnnnnnnnnnnnnnnnnnnnnnnnnnnnnnnnnnnnnnnnnnnnnnnnnnnnnnnnnnnnnnnnnnnnnnnnnnnnnnnnnnnnnnnnnnnnnnnnnnnnnnnnnnnnnnnnnnnnnnnnnnnnnnnnnnnnnnnnnnnnnnnnnnnnnnnnnnnnnnnnnnnnnnnnnnnnnnnnnnnnnnnnnnnnnnnnnnnnnnnnnnnnnnnnnnnnnnnnnnnnnnnnnnnnnnnnnnnnnnnnnnnnnnnnnnnnnnnnnnnnnnnnnnnnnnnnnnnnnnnnnnnnnnnnnnnnnnnnnnnnnnnnnnnnnnnnnnnnnnnnnnnnnnnnnnnnnnnnnnnnnnnnnnnnnnnnnnnnnnnnnnnnnnnnnnnnnnnnnnnnnnnnnnnnnnnnnnnnnnnnnnnnnnnnnnnnnnnnnnnnnnnnnnnnnnnnnnnnnnnnnnnnnnnnnnnnnnnnnnnnnnnnnnnnnnnnnnnnnnnnnnnnnnnnnnnnnnnnnnnnnnnnnnnnnnnnnnnnnnnnnnnnnnnnnnnnnnnnnnnnnnnnnnnnnnnnnnnnnnnnnnnnnnnnnnnnnnnnnnnnnnnnnnnnnnnnnnnnnnnnnnnnnnnnnnnnnnnnnnnnnnnnnnnnnnnnnnnnnnnnnnnnnnnnnnnnnnnnnnnnnnnnnnnnnnnnnnnnnnnnnnnnnnnnnnnnnnnnnnnnnnnnnnnnnnnnnnnnnnnnnnnnnnnnnnnnnnnnnnnnnnnnnnnnnnnnnnnnnnnnnnnnnnnnnnnnnnnnnnnnnnnnnnnnnnnnnnnnnnnnnnnnnnnnnnnnnnnnnnnnnnnnnnnnnnnnnnnnnnnnnnnnnnnnnnnnnnnnnnnnnnnnnnnnnnnnnnnnnnnnnnnnnnnnnnnnnnnnnnnnnnnnnnnnnnnnnnnnnnnnnnnnnnnnnnnnnnnnnnnnnnnnnnnnnnnnnnnnnnnnnnnnnnnnnnnnnnnnnnnnnnnnnnnnnnnnnnnnnnnnnnnnnnnnnnnnnnnnnnnnnnnnnnnnnnnnnnnnnnnnnnnnnnnnnnnnnnnnnnnnnnnnnnnnnnnnnnnnnnnnnnnnnnnnnnnnnnnnnnnnnnnnnnnnnnnnnnnnnnnnnnnnnnnnnnnnnnnnnnnnnnnnnnnnnnnnnnnnnnnnnnnnnnnnnnnnnnnnnnnnnnnnnnnnnnnnnnnnnnnnnnnnnnnnnnnnnnnnnnnnnnnnnnnnnnnnnnnnnnnnnnnnnnnnnnnnnnnnnnnnnnnnnnnnnnnnnnnnnnnnnnnnnnnnnnnnnnnnnnnnnnnnnnnnnnnnnnnnnnnnnnnnnnnnnnnnnnnnnnnnnnnnnnnnnnnnnnnnnnnnnnnnnnnnnnnnnnnnnnnnnnnnnnnnnnnnnnnnnnnnnnnnnnnnnnnnnnnnnnnnnnnnnnnnnnnnnnnnnnnnnnnnnnnnnnnnnnnnnnnnnnnnnnnnnnnnnnnnnnnnnnnnnnnnnnnnnnnnnnnnnnnnnnnnnnnnnnnnnnnnnnnnnnnnnnnnnnnnnnnnnnnnnnnnnnnnnnnnnnnnnnnnnnnnnnnnnnnnnnnnnnnnnnnnnnnnnnnnnnnnnnnnnnnnnnnnnnnnnnnnnnnnnnnnnnnnnnnnnnnnnnnnnnnnnnnnnnnnnnnnnnnnnnnnnnnnnnnnnnnnnnnnnnnnnnnnnnnnnnnnnnnnnnnnnnnnnnnnnnnnnnnnnnnnnnnnnnnnnnnnnnnnnnnnnnnnnnnnnnnnnnnnnnnnnnnnnnnnnnnnnnnnnnnnnnnnnnnnnnnnnnnnnnnnnnnnnnnnnnnnnnnnnnnnnnnnnnnnnnnnnnnnnnnnnnnnnnnnnnnnnnnnnnnnnnnnnnnnnnnnnnnnnnnnnnnnnnnnnnnnnnnnnnnnnnnnnnnnnnnnnnnnnnnnnnnnnnnnnnnnnnnnnnnnnnnnnnnnnnnnnnnnnnnnnnnnnnnnnnnnnnnnnnnnnnnnnnnnnnnnnnnnnnnnnnnnnnnnnnnnnnnnnnnnnnnnnnnnnnnnnnnnnnnnnnnnnnnnnnnnnnnnnnnnnnnnnnnnnnnnnnnnnnnnnnnnnnnnnnnnnnnnnnnnnnnnnnnnnnnnnnnnnnnnnnnnnnnnnnnnnnnnnnnnnnnnnnnnnnnnnnnnnnnnnnnnnnnnnnnnnnnnnnnnnnnnnnnnnnnnnnnnnnnnnnnnnnnnnnnnnnnnnnnnnnnnnnnnnnnnnnnnnnnnnnnnnnnnnnnnnnnnnnnnnnnnnnnnnnnnnnnnnnnnnnnnnnnnnnnnnnnnnnnnnnnnnnnnnnnnnnnnnnnnnnnnnnnnnnnnnnnnnnnnnnnnnnnnnnnnnnnnnnnnnnnnnnnnnnnnnnnnnnnnnnnnnnnnnnnnnnnnnnnnnnnnnnnnnnnnnnnnnnnnnnnnnnnnnnnnnnnnnnnnnnnnnnnnnnnnnnnnnnnnnnnnnnnnnnnnnnnnnnnnnnnnnnnnnnnnnnnnnnnnnnnnnnnnnnnnnnnnnnnnnnnnnnnnnnnnnnnnnnnnnnnnnnnnnnnnnnnnnnnnnnnnnnnnnnnnnnnnnnnnnnnnnnnnnnnnnnnnnnnnnnnnnnnnnnnnnnnnnnnnnnnnnnnnnnnnnnnnnnnnnnnnnnnnnnnnnnnnnnnnnnnnnnnnnnnnnnnnnnnnnnnnnnnnnnnnnnnnnnnnnnnnnnnnnnnnnnnnnnnnnnnnnnnnnnnnnnnnnnnnnnnnnnnnnnnnnnnnnnnnnnnnnnnnnnnnnnnnnnnnnnnnnnnnnnnnnnnnnnnnnnnnnnnnnnnnnnnnnnnnnnnnnnnnnnnnnnnnnnnnnnnnnnnnnnnnnnnnnnnnnnnnnnnnnnnnnnnnnnnnnnnnnnnnnnnnnnnnnnnnnnnnnnnnnnnnnnnnnnnnnnnnnnnnnnnnnnnnnnnnnnnnnnnnnnnnnnnnnnnnnnnnnnnnnnnnnnnnnnnnnnnnnnnnnnnnnnnnnnnnnnnnnnnnnnnnnnnnnnnnnnnnnnnnnnnnnnnnnnnnnnnnnnnnnnnnnnnnnnnnnnnnnnnnnnnnnnnnnnnnnnnnnnnnnnnnnnnnnnnnnnnnnnnnnnnnnnnnnnnnnnnnnnnnnnnnnnnnnnnnnnnnnnnnnnnnnnnnnnnnnnnnnnnnnnnnnnnnnnnnnnnnnnnnnnnnnnnnnnnnnnnnnnnnnnnnnnnnnnnnnnnnnnnnnnnnnnnnnnnnnnnnnnnnnnnnnnnnnnnnnnnnnnnnnnnnnnnnnnnnnnnnnnnnnnnnnnnnnnnnnnnnnnnnnnnnnnnnnnnnnnnnnnnnnnnnnnnnnnnnnnnnnnnnnnnnnnnnnnnnnnnnnnnnnnnnnnnnnnnnnnnnnnnnnnnnnnnnnnnnnnnnnnnnnnnnnnnnnnnnnnnnnnnnnnnnnnnnnnnnnnnnnnnnnnnnnnnnnnnnnnnnnnnnnnnnnnnnnnnnnnnnnnnnnnnnnnnnnnnnnnnnnnnnnnnnnnnnnnnnnnnnnnnnnnnnnnnnnnnnnnnnnnnnnnnnnnnnnnnnnnnnnnnnnnnnnnnnnnnnnnnnnnnnnnnnnnnnnnnnnnnnnnnnnnnnnnnnnnnnnnnnnnnnnnnnnnnnnnnnnnnnnnnnnnnnnnnnnnnnnnnnnnnnnnnnnnnnnnnnnnnnnnnnnnnnnnnnnnnnnnnnnnnnnnnnnnnnnnnnnnnnnnnnnnnnnnnnnnnnnnnnnnnnnnnnnnnnnnnnnnnnnnnnnnnnnnnnnnnnnnnnnnnnnnnnnnnnnnnnnnnnnnnnnnnnnnnnnnnnnnnnnnnnnnnnnnnnnnnnnnnnnnnnnnnnnnnnnnnnnnnnnnnnnnnnnnnnnnnnnnnnnnnnnnnnnnnnnnnnnnnnnnnnnnnnnnnnnnnnnnnnnnnnnnnnnnnnnnnnnnnnnnnnnnnnnnnnnnnnnnnnnnnnnnnnnnnnnnnnnnnnnnnnnnnnnnnnnnnnnnnnnnnnnnnnnnnnnnnnnnnnnnnnnnnnnnnnnnnnnnnnnnnnnnnnnnnnnnnnnnnnnnnnnnnnnnnnnnnnnnnnnnnnnnnnnnnnnnnnnnnnnnnnnnnnnnnnnnnnnnnnnnnnnnnnnnnnnnnnnnnnnnnnnnnnnnnnnnnnnnnnnnnnnnnnnnnnnnnnnnnnnnnnnnnnnnnnnnnnnnnnnnnnnnnnnnnnnnnnnnnnnnnnnnnnnnnnnnnnnnnnnnnnnnnnnnnnnnnnnnnnnnnnnnnnnnnnnnnnnnnnnnnnnnnnnnnnnnnnnnnnnnnnnnnnnnnnnnnnnnnnnnnnnnnnnnnnnnnnnnnnnnnnnnnnnnnnnnnnnnnnnnnnnnnnnnnnnnnnnnnnnnnnnnnnnnnnnnnnnnnnnnnnnnnnnnnnnnnnnnnnnnnnnnnnnnnnnnnnnnnnnnnnnnnnnnnnnnnnnnnnnnnnnnnnnnnnnnnnnnnnnnnnnnnnnnnnnnnnnnnnnnnnnnnnnnnnnnnnnnnnnnnnnnnnnnnnnnnnnnnnnnnnnnnnnnnnnnnnnnnnnnnnnnnnnnnnnnnnnnnnnnnnnnnnnnnnnnnnnnnnnnnnnnnnnnnnnnnnnnnnnnnnnnnnnnnnnnnnnnnnnnnnnnnnnnnnnnnnnnnnnnnnnnnnnnnnnnnnnnnnnnnnnnnnnnnnnnnnnnnnnnnnnnnnnnnnnnnnnnnnnnnnnnnnnnnnnnnnnnnnnnnnnnnnnnnnnnnnnnnnnnnnnnnnnnnnnnnnnnnnnnnnnnnnnnnnnnnnnnnnnnnnnnnnnnnnnnnnnnnnnnnnnnnnnnnnnnnnnnnnnnnnnnnnnnnnnnnnnnnnnnnnnnnnnnnnnnnnnnnnnnnnnnnnnnnnnnnnnnnnnnnnnnnnnnnnnnnnnnnnnnnnnnnnnnnnnnnnnnnnnnnnnnnnnnnnnnnnnnnnnnnnnnnnnnnnnnnnnnnnnnnnnnnnnnnnnnnnnnnnnnnnnnnnnnnnnnnnnnnnnnnnnnnnnnnnnnnnnnnnnnnnnnnnnnnnnnnnnnnnnnnnnnnnnnnnnnnnnnnnnnnnnnnnnnnnnnnnnnnnnnnnnnnnnnnnnnnnnnnnnnnnnnnnnnnnnnnnnnnnnnnnnnnnnnnnnnnnnnnnnnnnnnnnnnnnnnnnnnnnnnnnnnnnnnnnnnnnnnnnnnnnnnnnnnnnnnnnnnnnnnnnnnnnnnnnnnnnnnnnnnnnnnnnnnnnnnnnnnnnnnnnnnnnnnnnnnnnnnnnnnnnnnnnnnnnnnnnnnnnnnnnnnnnnnnnnnnnnnnnnnnnnnnnnnnnnnnnnnnnnnnnnnnnnnnnnnnnnnnnnnnnnnnnnnnnnnnnnnnnnnnnnnnnnnnnnnnnnnnnnnnnnnnnnnnnnnnnnnnnnnnnnnnnnnnnnnnnnnnnnnnnnnnnnnnnnnnnnnnnnnnnnnnnnnnnnnnnnnnnnnnnnnnnnnnnnnnnnnnnnnnnnnnnnnnnnnnnnnnnnnnnnnnnnnnnnnnnnnnnnnnnnnnnnnnnnnnnnnnnnnnnnnnnnnnnnnnnnnnnnnnnnnnnnnnnnnnnnnnnnnnnnnnnnnnnnnnnnnnnnnnnnnnnnnnnnnnnnnnnnnnnnnnnnnnnnnnnnnnnnnnnnnnnnnnnnnnnnnnnnnnnnnnnnnnnnnnnnnnnnnnnnnnnnnnnnnnnnnnnnnnnnnnnnnnnnnnnnnnnnnnnnnnnnnnnnnnnnnnnnnnnnnnnnnnnnnnnnnnnnnnnnnnnnnnnnnnnnnnnnnnnnnnnnnnnnnnnnnnnnnnnnnnnnnnnnnnnnnnnnnnnnnnnnnnnnnnnnnnnnnnnnnnnnnnnnnnnnnnnnnnnnnnnnnnnnnnnnnnnnnnnnnnnnnnnnnnnnnnnnnnnnnnnnnnnnnnnnnnnnnnnnnnnnnnnnnnnnnnnnnnnnnnnnnnnnnnnnnnnnnnnnnnnnnnnnnnnnnnnnnnnnnnnnnnnnnnnnnnnnnnnnnnnnnnnnnnnnnnnnnnnnnnnnnnnnnnnnnnnnnnnnnnnnnnnnnnnnnnnnnnnnnnnnnnnnnnnnnnnnnnnnnnnnnnnnnnnnnnnnnnnnnnnnnnnnnnnnnnnnnnnnnnnnnnnnnnnnnnnnnnnnnnnnnnnnnnnnnnnnnnnnnnnnnnnnnnnnnnnnnnnnnnnnnnnnnnnnnnnnnnnnnnnnnnnnnnnnnnnnnnnnnnnnnnnnnnnnnnnnnnnnnnnnnnnnnnnnnnnnnnnnnnnnnnnnnnnnnnnnnnnnnnnnnnnnnnnnnnnnnnnnnnnnnnnnnnnnnnnnnnnnnnnnnnnnnnnnnnnnnnnnnnnnnnnnnnnnnnnnnnnnnnnnnnnnnnnnnnnnnnnnnnnnnnnnnnnnnnnnnnnnnnnnnnnnnnnnnnnnnnnnnnnnnnnnnnnnnnnnnnnnnnnnnnnnnnnnnnnnnnnnnnnnnnnnnnnnnnnnnnnnnnnnnnnnnnnnnnnnnnnnnnnnnnnnnnnnnnnnnnnnnnnnnnnnnnnnnnnnnnnnnnnnnnnnnnnnnnnnnnnnnnnnnnnnnnnnnnnnnnnnnnnnnnnnnnnnnnnnnnnnnnnnnnnnnnnnnnnnnnnnnnnnnnnnnnnnnnnnnnnnnnnnnnnnnnnnnnnnnnnnnnnnnnnnnnnnnnnnnnnnnnnnnnnnnnnnnnnnnnnnnnnnnnnnnnnnnnnnnnnnnnnnnnnnnnnnnnnnnnnnnnnnnnnnnnnnnnnnnnnnnnnnnnnnnnnnnnnnnnnnnnnnnnnnnnnnnnnnnnnnnnnnnnnnnnnnnnnnnnnnnnnnnnnnnnnnnnnnnnnnnnnnnnnnnnnnnnnnnnnnnnnnnnnnnnnnnnnnnnnnnnnnnnnnnnnnnnnnnnnnnnnnnnnnnnnnnnnnnnnnnnnnnnnnnnnnnnnnnnnnnnnnnnnnnnnnnnnnnnnnnnnnnnnnnnnnnnnnnnnnnnnnnnnnnnnnnnnnnnnnnnnnnnnnnnnnnnnnnnnnnnnnnnnnnnnnnnnnnnnnnnnnnnnnnnnnnnnnnnnnnnnnnnnnnnnnnnnnnnnnnnnnnnnnnnnnnnnnnnnnnnnnnnnnnnnnnnnnnnnnnnnnnnnnnnnnnnnnnnnnnnnnnnnnnnnnnnnnnnnnnnnnnnnnnnnnnnnnnnnnnnnnnnnnnnnnnnnnnnnnnnnnnnnnnnnnnnnnnnnnnnnnnnnnnnnnnnnnnnnnnnnnnnnnnnnnnnnnnnnnnnnnnnnnnnnnnnnnnnnnnnnnnnnnnnnnnnnnnnnnnnnnnnnnnnnnnnnnnnnnnnnnnnnnnnnnnnnnnnnnnnnnnnnnnnnnnnnnnnnnnnnnnnnnnnnnnnnnnnnnnnnnnnnnnnnnnnnnnnnnnnnnnnnnnnnnnnnnnnnnnnnnnnnnnnnnnnnnnnnnnnnnnnnnnnnnnnnnnnnnnnnnnnnnnnnnnnnnnnnnnnnnnnnnnnnnnnnnnnnnnnnnnnnnnnnnnnnnnnnnnnnnnnnnnnnnnnnnnnnnnnnnnnnnnnnnnnnnnnnnnnnnnnnnnnnnnnnnnnnnnnnnnnnnnnnnnnnnnnnnnnnnnnnnnnnnnnnnnnnnnnnnnnnnnnnnnnnnnnnnnnnnnnnnnnnnnnnnnnnnnnnnnnnnnnnnnnnnnnnnnnnnnnnnnnnnnnnnnnnnnnnnnnnnnnnnnnnnnnnnnnnnnnnnnnnnnnnnnnnnnnnnnnnnnnnnnnnnnnnnnnnnnnnnnnnnnnnnnnnnnnnnnnnnnnnnnnnnnnnnnnnnnnnnnnnnnnnnnnnnnnnnnnnnnnnnnnnnnnnnnnnnnnnnnnnnnnnnnnnnnnnnnnnnnnnnnnnnnnnnnnnnnnnnnnnnnnnnnnnnnnnnnnnnnnnnnnnnnnnnnnnnnnnnnnnnnnnnnnnnnnnnnnnnnnnnnnnnnnnnnnnnnnnnnnnnnnnnnnnnnnnnnnnnnnnnnnnnnnnnnnnnnnnnnnnnnnnnnnnnnnnnnnnnnnnnnnnnnnnnnnnnnnnnnnnnnnnnnnnnnnnnnnnnnnnnnnnnnnnnnnnnnnnnnnnnnnnnnnnnnnnnnnnnnnnnnnnnnnnnnnnnnnnnnnnnnnnnnnnnnnnnnnnnnnnnnnnnnnnnnnnnnnnnnnnnnnnnnnnnnnnnnnnnnnnnnnnnnnnnnnnnnnnnnnnnnnnnnnnnnnnnnnnnnnnnnnnnnnnnnnnnnnnnnnnnnnnnnnnnnnnnnnnnnnnnnnnnnnnnnnnnnnnnnnnnnnnnnnnnnnnnnnnnnnnnnnnnnnnnnnnnnnnnnnnnnnnnnnnnnnnnnnnnnnnnnnnnnnnnnnnnnnnnnnnnnnnnnnnnnnnnnnnnnnnnnnnnnnnnnnnnnnnnnnnnnnnnnnnnnnnnnnnnnnnnnnnnnnnnnnnnnnnnnnnnnnnnnnnnnnnnnnnnnnnnnnnnnnnnnnnnnnnnnnnnnnnnnnnnnnnnnnnnnnnnnnnnnnnnnnnnnnnnnnnnnnnnnnnnnnnnnnnnnnnnnnnnnnnnnnnnnnnnnnnnnnnnnnnnnnnnnnnnnnnnnnnnnnnnnnnnnnnnnnnnnnnnnnnnnnnnnnnnnnnnnnnnnnnnnnnnnnnnnnnnnnnnnnnnnnnnnnnnnnnnnnnnnnnnnnnnnnnnnnnnnnnnnnnnnnnnnnnnnnnnnnnnnnnnnnnnnnnnnnnnnnnnnnnnnnnnnnnnnnnnnnnnnnnnnnnnnnnnnnnnnnnnnnnnnnnnnnnnnnnnnnnnnnnnnnnnnnnnnnnnnnnnnnnnnnnnnnnnnnnnnnnnnnnnnnnnnnnnnnnnnnnnnnnnnnnnnnnnnnnnnnnnnnnnnnnnnnnnnnnnnnnnnnnnnnnnnnnnnnnnnnnnnnnnnnnnnnnnnnnnnnnnnnnnnnnnnnnnnnnnnnnnnnnnnnnnnnnnnnnnnnnnnnnnnnnnnnnnnnnnnnnnnnnnnnnnnnnnnnnnnnnnnnnnnnnnnnnnnnnnnnnnnnnnnnnnnnnnnnnnnnnnnnnnnnnnnnnnnnnnnnnnnnnnnnnnnnnnnnnnnnnnnnnnnnnnnnnnnnnnnnnnnnnnnnnnnnnnnnnnnnnnnnnnnnnnnnnnnnnnnnnnnnnnnnnnnnnnnnnnnnnnnnnnnnnnnnnnnnnnnnnnnnnnnnnnnnnnnnnnnnnnnnnnnnnnnnnnnnnnnnnnnnnnnnnnnnnnnnnnnnnnnnnnnnnnnnnnnnnnnnnnnnnnnnnnnnnnnnnnnnnnnnnnnnnnnnnnnnnnnnnnnnnnnnnnnnnnnnnnnnnnnnnnnnnnnnnnnnnnnnnnnnnnnnnnnnnnnnnnnnnnnnnnnnnnnnnnnnnnnnnnnnnnnnnnnnnnnnnnnnnnnnnnnnnnnnnnnnnnnnnnnnnnnnnnnnnnnnnnnnnnnnnnnnnnnnnnnnnnnnnnnnnnnnnnnnnnnnnnnnnnnnnnnnnnnnnnnnnnnnnnnnnnnnnnnnnnnnnnnnnnnnnnnnnnnnnnnnnnnnnnnnnnnnnnnnnnnnnnnnnnnnnnnnnnnnnnnnnnnnnnnnnnnnnnnnnnnnnnnnnnnnnnnnnnnnnnnnnnnnnnnnnnnnnnnnnnnnnnnnnnnnnnnnnnnnnnnnnnnnnnnnnnnnnnnnnnnnnnnnnnnnnnnnnnnnnnnnnnnnnnnnnnnnnnnnnnnnnnnnnnnnnnnnnnnnnnnnnnnnnnnnnnnnnnnnnnnnnnnnnnnnnnnnnnnnnnnnnnnnnnnnnnnnnnnnnnnnnnnnnnnnnnnnnnnnnnnnnnnnnnnnnnnnnnnnnnnnnnnnnnnnnnnnnnnnnnnnnnnnnnnnnnnnnnnnnnnnnnnnnnnnnnnnnnnnnnnnnnnnnnnnnnnnnnnnnnnnnnnnnnnnnnnnnnnnnnnnnnnnnnnnnnnnnnnnnnnnnnnnnnnnnnnnnnnnnnnnnnnnnnnnnnnnnnnnnnnnnnnnnnnnnnnnnnnnnnnnnnnnnnnnnnnnnnnnnnnnnnnnnnnnnnnnnnnnnnnnnnnnnnnnnnnnnnnnnnnnnnnnnnnnnnnnnnnnnnnnnnnnnnnnnnnnnnnnnnnnnnnnnnnnnnnnnnnnnnnnnnnnnnnnnnnnnnnnnnnnnnnnnnnnnnnnnnnnnnnnnnnnnnnnnnnnnnnnnnnnnnnnnnnnnnnnnnnnnnnnnnnnnnnnnnnnnnnnnnnnnnnnnnnnnnnnnnnnnnnnnnnnnnnnnnnnnnnnnnnnnnnnnnnnnnnnnnnnnnnnnnnnnnnnnnnnnnnnnnnnnnnnnnnnnnnnnnnnnnnnnnnnnnnnnnnnnnnnnnnnnnnnnnnnnnnnnnnnnnnnnnnnnnnnnnnnnnnnnnnnnnnnnnnnnnnnnnnnnnnnnnnnnnnnnnnnnnnnnnnnnnnnnnnnnnnnnnnnnnnnnnnnnnnnnnnnnnnnnnnnnnnnnnnnnnnnnnnnnnnnnnnnnnnnnnnnnnnnnnnnnnnnnnnnnnnnnnnnnnnnnnnnnnnnnnnnnnnnnnnnnnnnnnnnnnnnnnnnnnnnnnnnnnnnnnnnnnnnnnnnnnnnnnnnnnnnnnnnnnnnnnnnnnnnnnnnnnnnnnnnnnnnnnnnnnnnnnnnnnnnnnnnnnnnnnnnnnnnnnnnnnnnnnnnnnnnnnnnnnnnnnnnnnnnnnnnnnnnnnnnnnnnnnnnnnnnnnnnnnnnnnnnnnnnnnnnnnnnnnnnnnnnnnnnnnnnnnnnnnnnnnnnnnnnnnnnnnnnnnnnnnnnnnnnnnnnnnnnnnnnnnnnnnnnnnnnnnnnnnnnnnnnnnnnnnnnnnnnnnnnnnnnnnnnnnnnnnnnnnnnnnnnnnnnnnnnnnnnnnnnnnnnnnnnnnnnnnnnnnnnnnnnnnnnnnnnnnnnnnnnnnnnnnnnnnnnnnnnnnnnnnnnnnnnnnnnnnnnnnnnnnnnnnnnnnnnnnnnnnnnnnnnnnnnnnnnnnnnnnnnnnnnnnnnnnnnnnnnnnnnnnnnnnnnnnnnnnnnnnnnnnnnnnnnnnnnnnnnnnnnnnnnnnnnnnnnnnnnnnnnnnnnnnnnnnnnnnnnnnnnnnnnnnnnnnnnnnnnnnnnnnnnnnnnnnnnnnnnnnnnnnnnnnnnnnnnnnnnnnnnnnnnnnnnnnnnnnnnnnnnnnnnnnnnnnnnnnnnnnnnnnnnnnnnnnnnnnnnnnnnnnnnnnnnnnnnnnnnnnnnnnnnnnnnnnnnnnnnnnnnnnnnnnnnnnnnnnnnnnnnnnnnnnnnnnnnnnnnnnnnnnnnnnnnnnnnnnnnnnnnnnnnnnnnnnnnnnnnnnnnnnnnnnnnnnnnnnnnnnnnnnnnnnnnnnnnnnnnnnnnnnnnnnnnnnnnnnnnnnnnnnnnnnnnnnnnnnnnnnnnnnnnnnnnnnnnnnnnnnnnnnnnnnnnnnnnnnnnnnnnnnnnnnnnnnnnnnnnnnnnnnnnnnnnnnnnnnnnnnnnnnnnnnnnnnnnnnnnnnnnnnnnnnnnnnnnnnnnnnnnnnnnnnnnnnnnnnnnnnnnnnnnnnnnnnnnnnnnnnnnnnnnnnnnnnnnnnnnnnnnnnnnnnnnnnnnnnnnnnnnnnnnnnnnnnnnnnnnnnnnnnnnnnnnnnnnnnnnnnnnnnnnnnnnnnnnnnnnnnnnnnnnnnnnnnnnnnnnnnnnnnnnnnnnnnnnnnnnnnnnnnnnnnnnnnnnnnnnnnnnnnnnnnnnnnnnnnnnnnnnnnnnnnnnnnnnnnnnnnnnnnnnnnnnnnnnnnnnnnnnnnnnnnnnnnnnnnnnnnnnnnnnnnnnnnnnnnnnnnnnnnnnnnnnnnnnnnnnnnnnnnnnnnnnnnnnnnnnnnnnnnnnnnnnnnnnnnnnnnnnnnnnnnnnnnnnnnnnnnnnnnnnnnnnnnnnnnnnnnnnnnnnnnnnnnnnnnnnnnnnnnnnnnnnnnnnnnnnnnnnnnnnnnnnnnnnnnnnnnnnnnnnnnnnnnnnnnnnnnnnnnnnnnnnnnnnnnnnnnnnnnnnnnnnnnnnnnnnnnnnnnnnnnnnnnnnnnnnnnnnnnnnnnnnnnnnnnnnnnnnnnnnnnnnnnnnnnnnnnnnnnnnnnnnnnnnnnnnnnnnnnnnnnnnnnnnnnnnnnnnnnnnnnnnnnnnnnnnnnnnnnnnnnnnnnnnnnnnnnnnnnnnnnnnnnnnnnnnnnnnnnnnnnnnnnnnnnnnnnnnnnnnnnnnnnnnnnnnnnnnnnnnnnnnnnnnnnnnnnnnnnnnnnnnnnnnnnnnnnnnnnnnnnnnnnnnnnnnnnnnnnnnnnnnnnnnnnnnnnnnnnnnnnnnnnnnnnnnnnnnnnnnnnnnnnnnnnnnnnnnnnnnnnnnnnnnnnnnnnnnnnnnnnnnnnnnnnnnnnnnnnnnnnnnnnnnnnnnnnnnnnnnnnnnnnnnnnnnnnnnnnnnnnnnnnnnnnnnnnnnnnnnnnnnnnnnnnnnnnnnnnnnnnnnnnnnnnnnnnnnnnnnnnnnnnnnnnnnnnnnnnnnnnnnnnnnnnnnnnnnnnnnnnnnnnnnnnnnnnnnnnnnnnnnnnnnnnnnnnnnnnnnnnnnnnnnnnnnnnnnnnnnnnnnnnnnnnnnnnnnnnnnnnnnnnnnnnnnnnnnnnnnnnnnnnnnnnnnnnnnnnnnnnnnnnnnnnnnnnnnnnnnnnnnnnnnnnnnnnnnnnnnnnnnnnnnnnnnnnnnnnnnnnnnnnnnnnnnnnnnnnnnnnnnnnnnnnnnnnnnnnnnnnnnnnnnnnnnnnnnnnnnnnnnnnnnnnnnnnnnnnnnnnnnnnnnnnnnnnnnnnnnnnnnnnnnnnnnnnnnnnnnnnnnnnnnnnnnnnnnnnnnnnnnnnnnnnnnnnnnnnnnnnnnnnnnnnnnnnnnnnnnnnnnnnnnnnnnnnnnnnnnnnnnnnnnnnnnnnnnnnnnnnnnnnnnnnnnnnnnnnnnnnnnnnnnnnnnnnnnnnnnnnnnnnnnnnnnnnnnnnnnnnnnnnnnnnnnnnnnnnnnnnnnnnnnnnnnnnnnnnnnnnnnnnnnnnnnnnnnnnnnnnnnnnnnnnnnnnnnnnnnnnnnnnnnnnnnnnnnnnnnnnnnnnnnnnnnnnnnnnnnnnnnnnnnnnnnnnnnnnnnnnnnnnnnnnnnnnnnnnnnnnnnnnnnnnnnnnnnnnnnnnnnnnnnnnnnnnnnnnnnnnnnnnnnnnnnnnnnnnnnnnnnnnnnnnnnnnnnnnnnnnnnnnnnnnnnnnnnnnnnnnnnnnnnnnnnnnnnnnnnnnnnnnnnnnnnnnnnnnnnnnnnnnnnnnnnnnnnnnnnnnnnnnnnnnnnnnnnnnnnnnnnnnnnnnnnnnnnnnnnnnnnnnnnnnnnnnnnnnnnnnnnnnnnnnnnnnnnnnnnnnnnnnnnnnnnnnnnnnnnnnnnnnnnnnnnnnnnnnnnnnnnnnnnnnnnnnnnnnnnnnnnnnnnnnnnnnnnnnnnnnnnnnnnnnnnnnnnnnnnnnnnnnnnnnnnnnnnnnnnnnnnnnnnnnnnnnnnnnnnnnnnnnnnnnnnnnnnnnnnnnnnnnnnnnnnnnnnnnnnnnnnnnnnnnnnnnnnnnnnnnnnnnnnnnnnnnnnnnnnnnnnnnnnnnnnnnnnnnnnnnnnnnnnnnnnnnnnnnnnnnnnnnnnnnnnnnnnnnnnnnnnnnnnnnnnnnnnnnnnnnnnnnnnnnnnnnnnnnnnnnnnnnnnnnnnnnnnnnnnnnnnnnnnnnnnnnnnnnnnnnnnnnnnnnnnnnnnnnnnnnnnnnnnnnnnnnnnnnnnnnnnnnnnnnnnnnnnnnnnnnnnnnnnnnnnnnnnnnnnnnnnnnnnnnnnnnnnnnnnnnnnnnnnnnnnnnnnnnnnnnnnnnnnnnnnnnnnnnnnnnnnnnnnnnnnnnnnnnnnnnnnnnnnnnnnnnnnnnnnnnnnnnnnnnnnnnnnnnnnnnnnnnnnnnnnnnnnnnnnnnnnnnnnnnnnnnnnnnnnnnnnnnnnnnnnnnnnnnnnnnnnnnnnnnnnnnnnnnnnnnnnnnnnnnnnnnnnnnnnnnnnnnnnnnnnnnnnnnnnnnnnnnnnnnnnnnnnnnnnnnnnnnnnnnnnnnnnnnnnnnnnnnnnnnnnnnnnnnnnnnnnnnnnnnnnnnnnnnnnnnnnnnnnnnnnnnnnnnnnnnnnnnnnnnnnnnnnnnnnnnnnnnnnnnnnnnnnnnnnnnnnnnnnnnnnnnnnnnnnnnnnnnnnnnnnnnnnnnnnnnnnnnnnnnnnnnnnnnnnnnnnnnnnnnnnnnnnnnnnnnnnnnnnnnnnnnnnnnnnnnnnnnnnnnnnnnnnnnnnnnnnnnnnnnnnnnnnnnnnnnnnnnnnnnnnnnnnnnnnnnnnnnnnnnnnnnnnnnnnnnnnnnnnnnnnnnnnnnnnnnnnnnnnnnnnnnnnnnnnnnnnnnnnnnnnnnnnnnnnnnnnnnnnnnnnnnnnnnnnnnnnnnnnnnnnnnnnnnnnnnnnnnnnnnnnnnnnnnnnnnnnnnnnnnnnnnnnnnnnnnnnnnnnnnnnnnnnnnnnnnnnnnnnnnnnnnnnnnnnnnnnnnnnnnnnnnnnnnnnnnnnnnnnnnnnnnnnnnnnnnnnnnnnnnnnnnnnnnnnnnnnnnnnnnnnnnnnnnnnnnnnnnnnnnnnnnnnnnnnnnnnnnnnnnnnnnnnnnnnnnnnnnnnnnnnnnnnnnnnnnnnnnnnnnnnnnnnnnnnnnnnnnnnnnnnnnnnnnnnnnnnnnnnnnnnnnnnnnnnnnnnnnnnnnnnnnnnnnnnnnnnnnnnnnnnnnnnnnnnnnnnnnnnnnnnnnnnnnnnnnnnnnnnnnnnnnnnnnnnnnnnnnnnnnnnnnnnnnnnnnnnnnnnnnnnnnnnnnnnnnnnnnnnnnnnnnnnnnnnnnnnnnnnnnnnnnnnnnnnnnnnnnnnnnnnnnnnnnnnnnnnnnnnnnnnnnnnnnnnnnnnnnnnnnnnnnnnnnnnnnnnnnnnnnnnnnnnnnnnnnnnnnnnnnnnnnnnnnnnnnnnnnnnnnnnnnnnnnnnnnnnnnnnnnnnnnnnnnnnnnnnnnnnnnnnnnnnnnnnnnnnnnnnnnnnnnnnnnnnnnnnnnnnnnnnnnnnnnnnnnnnnnnnnnnnnnnnnnnnnnnnnnnnnnnnnnnnnnnnnnnnnnnnnnnnnnnnnnnnnnnnnnnnnnnnnnnnnnnnnnnnnnnnnnnnnnnnnnnnnnnnnnnnnnnnnnnnnnnnnnnnnnnnnnnnnnnnnnnnnnnnnnnnnnnnnnnnnnnnnnnnnnnnnnnnnnnnnnnnnnnnnnnnnnnnnnnnnnnnnnnnnnnnnnnnnnnnnnnnnnnnnnnnnnnnnnnnnnnnnnnnnnnnnnnnnnnnnnnnnnnnnnnnnnnnnnnnnnnnnnnnnnnnnnnnnnnnnnnnnnnnnnnnnnnnnnnnnnnnnnnnnnnnnnnnnnnnnnnnnnnnnnnnnnnnnnnnnnnnnnnnnnnnnnnnnnnnnnnnnnnnnnnnnnnnnnnnnnnnnnnnnnnnnnnnnnnnnnnnnnnnnnnnnnnnnnnnnnnnnnnnnnnnnnnnnnnnnnnnnnnnnnnnnnnnnnnnnnnnnnnnnnnnnnnnnnnnnnnnnnnnnnnnnnnnnnnnnnnnnnnnnnnnnnnnnnnnnnnnnnnnnnnnnnnnnnnnnnnnnnnnnnnnnnnnnnnnnnnnnnnnnnnnnnnnnnnnnnnnnnnnnnnnnnnnnnnnnnnnnnnnnnnnnnnnnnnnnnnnnnnnnnnnnnnnnnnnnnnnnnnnnnnnnnnnnnnnnnnnnnnnnnnnnnnnnnnnnnnnnnnnnnnnnnnnnnnnnnnnnnnnnnnnnnnnnnnnnnnnnnnnnnnnnnnnnnnnnnnnnnnnnnnnnnnnnnnnnnnnnnnnnnnnnnnnnnnnnnnnnnnnnnnnnnnnnnnnnnnnnnnnnnnnnnnnnnnnnnnnnnnnnnnnnnnnnnnnnnnnnnnnnnnnnnnnnnnnnnnnnnnnnnnnnnnnnnnnnnnnnnnnnnnnnnnnnnnnnnnnnnnnnnnnnnnnnnnnnnnnnnnnnnnnnnnnnnnnnnnnnnnnnnnnnnnnnnnnnnnnnnnnnnnnnnnnnnnnnnnnnnnnnnnnnnnnnnnnnnnnnnnnnnnnnnnnnnnnnnnnnnnnnnnnnnnnnnnnnnnnnnnnnnnnnnnnnnnnnnnnnnnnnnnnnnnnnnnnnnnnnnnnnnnnnnnnnnnnnnnnnnnnnnnnnnnnnnnnnnnnnnnnnnnnnnnnnnnnnnnnnnnnnnnnnnnnnnnnnnnnnnnnnnnnnnnnnnnnnnnnnnnnnnnnnnnnnnnnnnnnnnnnnnnnnnnnnnnnnnnnnnnnnnnnnnnnnnnnnnnnnnnnnnnnnnnnnnnnnnnnnnnnnnnnnnnnnnnnnnnnnnnnnnnnnnnnnnnnnnnnnnnnnnnnnnnnnnnnnnnnnnnnnnnnnnnnnnnnnnnnnnnnnnnnnnnnnnnnnnnnnnnnnnnnnnnnnnnnnnnnnnnnnnnnnnnnnnnnnnnnnnnnnnnnnnnnnnnnnnnnnnnnnnnnnnnnnnnnnnnnnnnnnnnnnnnnnnnnnnnnnnnnnnnnnnnnnnnnnnnnnnnnnnnnnnnnnnnnnnnnnnnnnnnnnnnnnnnnnnnnnnnnnnnnnnnnnnnnnnnnnnnnnnnnnnnnnnnnnnnnnnnnnnnnnnnnnnnnnnnnnnnnnnnnnnnnnnnnnnnnnnnnnnnnnnnnnnnnnnnnnnnnnnnnnnnnnnnnnnnnnnnnnnnnnnnnnnnnnnnnnnnnnnnnnnnnnnnnnnnnnnnnnnnnnnnnnnnnnnnnnnnnnnnnnnnnnnnnnnnnnnnnnnnnnnnnnnnnnnnnnnnnnnnnnnnnnnnnnnnnnnnnnnnnnnnnnnnnnnnnnnnnnnnnnnnnnnnnnnnnnnnnnnnnnnnnnnnnnnnnnnnnnnnnnnnnnnnnnnnnnnnnnnnnnnnnnnnnnnnnnnnnnnnnnnnnnnnnnnnnnnnnnnnnnnnnnnnnnnnnnnnnnnnnnnnnnnnnnnnnnnnnnnnnnnnnnnnnnnnnnnnnnnnnnnnnnnnnnnnnnnnnnnnnnnnnnnnnnnnnnnnnnnnnnnnnnnnnnnnnnnnnnnnnnnnnnnnnnnnnnnnnnnnnnnnnnnnnnnnnnnnnnnnnnnnnnnnnnnnnnnnnnnnnnnnnnnnnnnnnnnnnnnnnnnnnnnnnnnnnnnnnnnnnnnnnnnnnnnnnnnnnnnnnnnnnnnnnnnnnnnnnnnnnnnnnnnnnnnnnnnnnnnnnnnnnnnnnnnnnnnnnnnnnnnnnnnnnnnnnnnnnnnnnnnnnnnnnnnnnnnnnnnnnnnnnnnnnnnnnnnnnnnnnnnnnnnnnnnnnnnnnnnnnnnnnnnnnnnnnnnnnnnnnnnnnnnnnnnnnnnnnnnnnnnnnnnnnnnnnnnnnnnnnnnnnnnnnnnnnnnnnnnnnnnnnnnnnnnnnnnnnnnnnnnnnnnnnnnnnnnnnnnnnnnnnnnnnnnnnnnnnnnnnnnnnnnnnnnnnnnnnnnnnnnnnnnnnnnnnnnnnnnnnnnnnnnnnnnnnnnnnnnnnnnnnnnnnnnnnnnnnnnnnnnnnnnnnnnnnnnnnnnnnnnnnnnnnnnnnnnnnnnnnnnnnnnnnnnnnnnnnnnnnnnnnnnnnnnnnnnnnnnnnnnnnnnnnnnnnnnnnnnnnnnnnnnnnnnnnnnnnnnnnnnnnnnnnnnnnnnnnnnnnnnnnnnnnnnnnnnnnnnnnnnnnnnnnnnnnnnnnnnnnnnnnnnnnnnnnnnnnnnnnnnnnnnnnnnnnnnnnnnnnnnnnnnnnnnnnnnnnnnnnnnnnnnnnnnnnnnnnnnnnnnnnnnnnnnnnnnnnnnnnnnnnnnnnnnnnnnnnnnnnnnnnnnnnnnnnnnnnnnnnnnnnnnnnnnnnnnnnnnnnnnnnnnnnnnnnnnnnnnnnnnnnnnnnnnnnnnnnnnnnnnnnnnnnnnnnnnnnnnnnnnnnnnnnnnnnnnnnnnnnnnnnnnnnnnnnnnnnnnnnnnnnnnnnnnnnnnnnnnnnnnnnnnnnnnnnnnnnnnnnnnnnnnnnnnnnnnnnnnnnnnnnnnnnnnnnnnnnnnnnnnnnnnnnnnnnnnnnnnnnnnnnnnnnnnnnnnnnnnnnnnnnnnnnnnnnnnnnnnnnnnnnnnnnnnnnnnnnnnnnnnnnnnnnnnnnnnnnnnnnnnnnnnnnnnnnnnnnnnnnnnnnnnnnnnnnnnnnnnnnnnnnnnnnnnnnnnnnnnnnnnnnnnnnnnnnnnnnnnnnnnnnnnnnnnnnnnnnnnnnnnnnnnnnnnnnnnnnnnnnnnnnnnnnnnnnnnnnnnnnnnnnnnnnnnnnnnnnnnnnnnnnnnnnnnnnnnnnnnnnnnnnnnnnnnnnnnnnnnnnnnnnnnnnnnnnnnnnnnnnnnnnnnnnnnnnnnnnnnnnnnnnnnnnnnnnnnnnnnnnnnnnnnnnnnnnnnnnnnnnnnnnnnnnnnnnnnnnnnnnnnnnnnnnnnnnnnnnnnnnnnnnnnnnnnnnnnnnnnnnnnnnnnnnnnnnnnnnnnnnnnnnnnnnnnnnnnnnnnnnnnnnnnnnnnnnnnnnnnnnnnnnnnnnnnnnnnnnnnnnnnnnnnnnnnnnnnnnnnnnnnnnnnnnnnnnnnnnnnnnnnnnnnnnnnnnnnnnnnnnnnnnnnnnnnnnnnnnnnnnnnnnnnnnnnnnnnnnnnnnnnnnnnnnnnnnnnnnnnnnnnnnnnnnnnnnnnnnnnnnnnnnnnnnnnnnnnnnnnnnnnnnnnnnnnnnnnnnnnnnnnnnnnnnnnnnnnnnnnnnnnnnnnnnnnnnnnnnnnnnnnnnnnnnnnnnnnnnnnnnnnnnnnnnnnnnnnnnnnnnnnnnnnnnnnnnnnnnnnnnnnnnnnnnnnnnnnnnnnnnnnnnnnnnnnnnnnnnnnnnnnnnnnnnnnnnnnnnnnnnnnnnnnnnnnnnnnnnnnnnnnnnnnnnnnnnnnnnnnnnnnnnnnnnnnnnnnnnnnnnnnnnnnnnnnnnnnnnnnnnnnnnnnnnnnnnnnnnnnnnnnnnnnnnnnnnnnnnnnnnnnnnnnnnnnnnnnnnnnnnnnnnnnnnnnnnnnnnnnnnnnnnnnnnnnnnnnnnnnnnnnnnnnnnnnnnnnnnnnnnnnnnnnnnnnnnnnnnnnnnnnnnnnnnnnnnnnnnnnnnnnnnnnnnnnnnnnnnnnnnnnnnnnnnnnnnnnnnnnnnnnnnnnnnnnnnnnnnnnnnnnnnnnnnnnnnnnnnnnnnnnnnnnnnnnnnnnnnnnnnnnnnnnnnnnnnnnnnnnnnnnnnnnnnnnnnnnnnnnnnnnnnnnnnnnnnnnnnnnnnnnnnnnnnnnnnnnnnnnnnnnnnnnnnnnnnnnnnnnnnnnnnnnnnnnnnnnnnnnnnnnnnnnnnnnnnnnnnnnnnnnnnnnnnnnnnnnnnnnnnnnnnnnnnnnnnnnnnnnnnnnnnnnnnnnnnnnnnnnnnnnnnnnnnnnnnnnnnnnnnnnnnnnnnnnnnnnnnnnnnnnnnnnnnnnnnnnnnnnnnnnnnnnnnnnnnnnnnnnnnnnnnnnnnnnnnnnnnnnnnnnnnnnnnnnnnnnnnnnnnnnnnnnnnnnnnnnnnnnnnnnnnnnnnnnnnnnnnnnnnnnnnnnnnnnnnnnnnnnnnnnnnnnnnnnnnnnnnnnnnnnnnnnnnnnnnnnnnnnnnnnnnnnnnnnnnnnnnnnnnnnnnnnnnnnnnnnnnnnnnnnnnnnnnnnnnnnnnnnnnnnnnnnnnnnnnnnnnnnnnnnnnnnnnnnnnnnnnnnnnnnnnnnnnnnnnnnnnnnnnnnnnnnnnnnnnnnnnnnnnnnnnnnnnnnnnnnnnnnnnnnnnnnnnnnnnnnnnnnnnnnnnnnnnnnnnnnnnnnnnnnnnnnnnnnnnnnnnnnnnnnnnnnnnnnnnnnnnnnnnnnnnnnnnnnnnnnnnnnnnnnnnnnnnnnnnnnnnnnnnnnnnnnnnnnnnnnnnnnnnnnnnnnnnnnnnnnnnnnnnnnnnnnnnnnnnnnnnnnnnnnnnnnnnnnnnnnnnnnnnnnnnnnnnnnnnnnnnnnnnnnnnnnnnnnnnnnnnnnnnnnnnnnnnnnnnnnnnnnnnnnnnnnnnnnnnnnnnnnnnnnnnnnnnnnnnnnnnnnnnnnnnnnnnnnnnnnnnnnnnnnnnnnnnnnnnnnnnnnnnnnnnnnnnnnnnnnnnnnnnnnnnnnnnnnnnnnnnnnnnnnnnnnnnnnnnnnnnnnnnnnnnnnnnnnnnnnnnnnnnnnnnnnnnnnnnnnnnnnnnnnnnnnnnnnnnnnnnnnnnnnnnnnnnnnnnnnnnnnnnnnnnnnnnnnnnnnnnnnnnnnnnnnnnnnnnnnnnnnnnnnnnnnnnnnnnnnnnnnnnnnnnnnnnnnnnnnnnnnnnnnnnnnnnnnnnnnnnnnnnnnnnnnnnnnnnnnnnnnnnnnnnnnnnnnnnnnnnnnnnnnnnnnnnnnnnnnnnnnnnnnnnnnnnnnnnnnnnnnnnnnnnnnnnnnnnnnnnnnnnnnnnnnnnnnnnnnnnnnnnnnnnnnnnnnnnnnnnnnnnnnnnnnnnnnnnnnnnnnnnnnnnnnnnnnnnnnnnnnnnnnnnnnnnnnnnnnnnnnnnnnnnnnnnnnnnnnnnnnnnnnnnnnnnnnnnnnnnnnnnnnnnnnnnnnnnnnnnnnnnnnnnnnnnnnnnnnnnnnnnnnnnnnnnnnnnnnnnnnnnnnnnnnnnnnnnnnnnnnnnnnnnnnnnnnnnnnnnnnnnnnnnnnnnnnnnnnnnnnnnnnnnnnnnnnnnnnnnnnnnnnnnnnnnnnnnnnnnnnnnnnnnnnnnnnnnnnnnnnnnnnnnnnnnnnnnnnnnnnnnnnnnnnnnnnnnnnnnnnnnnnnnnnnnnnnnnnnnnnnnnnnnnnnnnnnnnnnnnnnnnnnnnnnnnnnnnnnnnnnnnnnnnnnnnnnnnnnnnnnnnnnnnnnnnnnnnnnnnnnnnnnnnnnnnnnnnnnnnnnnnnnnnnnnnnnnnnnnnnnnnnnnnnnnnnnnnnnnnnnnnnnnnnnnnnnnnnnnnnnnnnnnnnnnnnnnnnnnnnnnnnnnnnnnnnnnnnnnnnnnnnnnnnnnnnnnnnnnnnnnnnnnnnnnnnnnnnnnnnnnnnnnnnnnnnnnnnnnnnnnnnnnnnnnnnnnnnnnnnnnnnnnnnnnnnnnnnnnnnnnnnnnnnnnnnnnnnnnnnnnnnnnnnnnnnnnnnnnnnnnnnnnnnnnnnnnnnnnnnnnnnnnnnnnnnnnnnnnnnnnnnnnnnnnnnnnnnnnnnnnnnnnnnnnnnnnnnnnnnnnnnnnnnnnnnnnnnnnnnnnnnnnnnnnnnnnnnnnnnnnnnnnnnnnnnnnnnnnnnnnnnnnnnnnnnnnnnnnnnnnnnnnnnnnnnnnnnnnnnnnnnnnnnnnnnnnnnnnnnnnnnnnnnnnnnnnnnnnnnnnnnnnnnnnnnnnnnnnnnnnnnnnnnnnnnnnnnnnnnnnnnnnnnnnnnnnnnnnnnnnnnnnnnnnnnnnnnnnnnnnnnnnnnnnnnnnnnnnnnnnnnnnnnnnnnnnnnnnnnnnnnnnnnnnnnnnnnnnnnnnnnnnnnnnnnnnnnnnnnnnnnnnnnnnnnnnnnnnnnnnnnnnnnnnnnnnnnnnnnnnnnnnnnnnnnnnnnnnnnnnnnnnnnnnnnnnnnnnnnnnnnnnnnnnnnnnnnnnnnnnnnnnnnnnnnnnnnnnnnnnnnnnnnnnnnnnnnnnnnnnnnnnnnnnnnnnnnnnnnnnnnnnnnnnnnnnnnnnnnnnnnnnnnnnnnnnnnnnnnnnnnnnnnnnnnnnnnnnnnnnnnnnnnnnnnnnnnnnnnnnnnnnnnnnnnnnnnnnnnnnnnnnnnnnnnnnnnnnnnnnnnnnnnnnnnnnnnnnnnnnnnnnnnnnnnnnnnnnnnnnnnnnnnnnnnnnnnnnnnnnnnnnnnnnnnnnnnnnnnnnnnnnnnnnnnnnnnnnnnnnnnnnnnnnnnnnnnnnnnnnnnnnnnnnnnnnnnnnnnnnnnnnnnnnnnnnnnnnnnnnnnnnnnnnnnnnnnnnnnnnnnnnnnnnnnnnnnnnnnnnnnnnnnnnnnnnnnnnnnnnnnnnnnnnnnnnnnnnnnnnnnnnnnnnnnnnnnnnnnnnnnnnnnnnnnnnnnnnnnnnnnnnnnnnnnnnnnnnnnnnnnnnnnnnnnnnnnnnnnnnnnnnnnnnnnnnnnnnnnnnnnnnnnnnnnnnnnnnnnnnnnnnnnnnnnnnnnnnnnnnnnnnnnnnnnnnnnnnnnnnnnnnnnnnnnnnnnnnnnnnnnnnnnnnnnnnnnnnnnnnnnnnnnnnnnnnnnnnnnnnnnnnnnnnnnnnnnnnnnnnnnnnnnnnnnnnnnnnnnnnnnnnnnnnnnnnnnnnnnnnnnnnnnnnnnnnnnnnnnnnnnnnnnnnnnnnnnnnnnnnnnnnnnnnnnnnnnnnnnnnnnnnnnnnnnnnnnnnnnnnnnnnnnnnnnnnnnnnnnnnnnnnnnnnnnnnnnnnnnnnnnnnnnnnnnnnnnnnnnnnnnnnnnnnnnnnnnnnnnnnnnnnnnnnnnnnnnnnnnnnnnnnnnnnnnnnnnnnnnnnnnnnnnnnnnnnnnnnnnnnnnnnnnnnnnnnnnnnnnnnnnnnnnnnnnnnnnnnnnnnnnnnnnnnnnnnnnnnnnnnnnnnnnnnnnnnnnnnnnnnnnnnnnnnnnnnnnnnnnnnnnnnnnnnnnnnnnnnnnnnnnnnnnnnnnnnnnnnnnnnnnnnnnnnnnnnnnnnnnnnnnnnnnnnnnnnnnnnnnnnnnnnnnnnnnnnnnnnnnnnnnnnnnnnnnnnnnnnnnnnnnnnnnnnnnnnnnnnnnnnnnnnnnnnnnnnnnnnnnnnnnnnnnnnnnnnnnnnnnnnnnnnnnnnnnnnnnnnnnnnnnnnnnnnnnnnnnnnnnnnnnnnnnnnnnnnnnnnnnnnnnnnnnnnnnnnnnnnnnnnnnnnnnnnnnnnnnnnnnnnnnnnnnnnnnnnnnnnnnnnnnnnnnnnnnnnnnnnnnnnnnnnnnnnnnnnnnnnnnnnnnnnnnnnnnnnnnnnnnnnnnnnnnnnnnnnnnnnnnnnnnnnnnnnnnnnnnnnnnnnnnnnnnnnnnnnnnnnnnnnnnnnnnnnnnnnnnnnnnnnnnnnnnnnnnnnnnnnnnnnnnnnnnnnnnnnnnnnnnnnnnnnnnnnnnnnnnnnnnnnnnnnnnnnnnnnnnnnnnnnnnnnnnnnnnnnnnnnnnnnnnnnnnnnnnnnnnnnnnnnnnnnnnnnnnnnnnnnnnnnnnnnnnnnnnnnnnnnnnnnnnnnnnnnnnnnnnnnnnnnnnnnnnnnnnnnnnnnnnnnnnnnnnnnnnnnnnnnnnnnnnnnnnnnnnnnnnnnnnnnnnnnnnnnnnnnnnnnnnnnnnnnnnnnnnnnnnnnnnnnnnnnnnnnnnnnnnnnnnnnnnnnnnnnnnnnnnnnnnnnnnnnnnnnnnnnnnnnnnnnnnnnnnnnnnnnnnnnnnnnnnnnnnnnnnnnnnnnnnnnnnnnnnnnnnnnnnnnnnnnnnnnnnnnnnnnnnnnnnnnnnnnnnnnnnnnnnnnnnnnnnnnnnnnnnnnnnnnnnnnnnnnnnnnnnnnnnnnnnnnnnnnnnnnnnnnnnnnnnnnnnnnnnnnnnnnnnnnnnnnnnnnnnnnnnnnnnnnnnnnnnnnnnnnnnnnnnnnnnnnnnnnnnnnnnnnnnnnnnnnnnnnnnnnnnnnnnnnnnnnnnnnnnnnnnnnnnnnnnnnnnnnnnnnnnnnnnnnnnnnnnnnnnnnnnnnnnnnnnnnnnnnnnnnnnnnnnnnnnnnnnnnnnnnnnnnnnnnnnnnnnnnnnnnnnnnnnnnnnnnnnnnnnnnnnnnnnnnnnnnnnnnnnnnnnnnnnnnnnnnnnnnnnnnnnnnnnnnnnnnnnnnnnnnnnnnnnnnnnnnnnnnnnnnnnnnnnnnnnnnnnnnnnnnnnnnnnnnnnnnnnnnnnnnnnnnnnnnnnnnnnnnnnnnnnnnnnnnnnnnnnnnnnnnnnnnnnnnnnnnnnnnnnnnnnnnnnnnnnnnnnnnnnnnnnnnnnnnnnnnnnnnnnnnnnnnnnnnnnnnnnnnnnnnnnnnnnnnnnnnnnnnnnnnnnnnnnnnnnnnnnnnnnnnnnnnnnnnnnnnnnnnnnnnnnnnnnnnnnnnnnnnnnnnnnnnnnnnnnnnnnnnnnnnnnnnnnnnnnnnnnnnnnnnnnnnnnnnnnnnnnnnnnnnnnnnnnnnnnnnnnnnnnnnnnnnnnnnnnnnnnnnnnnnnnnnnnnnnnnnnnnnnnnnnnnnnnnnnnnnnnnnnnnnnnnnnnnnnnnnnnnnnnnnnnnnnnnnnnnnnnnnnnnnnnnnnnnnnnnnnnnnnnnnnnnnnnnnnnnnnnnnnnnnnnnnnnnnnnnnnnnnnnnnnnnnnnnnnnnnnnnnnnnnnnnnnnnnnnnnnnnnnnnnnnnnnnnnnnnnnnnnnnnnnnnnnnnnnnnnnnnnnnnnnnnnnnnnnnnnnnnnnnnnnnnnnnnnnnnnnnnnnnnnnnnnnnnnnnnnnnnnnnnnnnnnnnnnnnnnnnnnnnnnnnnnnnnnnnnnnnnnnnnnnnnnnnnnnnnnnnnnnnnnnnnnnnnnnnnnnnnnnnnnnnnnnnnnnnnnnnnnnnnnnnnnnnnnnnnnnnnnnnnnnnnnnnnnnnnnnnnnnnnnnnnnnnnnnnnnnnnnnnnnnnnnnnnnnnnnnnnnnnnnnnnnnnnnnnnnnnnnnnnnnnnnnnnnnnnnnnnnnnnnnnnnnnnnnnnnnnnnnnnnnnnnnnnnnnnnnnnnnnnnnnnnnnnnnnnnnnnnnnnnnnnnnnnnnnnnnnnnnnnnnnnnnnnnnnnnnnnnnnnnnnnnnnnnnnnnnnnnnnnnnnnnnnnnnnnnnnnnnnnnnnnnnnnnnnnnnnnnnnnnnnnnnnnnnnnnnnnnnnnnnnnnnnnnnnnnnnnnnnnnnnnnnnnnnnnnnnnnnnnnnnnnnnnnnnnnnnnnnnnnnnnnnnnnnnnnnnnnnnnnnnnnnnnnnnnnnnnnnnnnnnnnnnnnnnnnnnnnnnnnnnnnnnnnnnnnnnnnnnnnnnnnnnnnnnnnnnnnnnnnnnnnnnnnnnnnnnnnnnnnnnnnnnnnnnnnnnnnnnnnnnnnnnnnnnnnnnnnnnnnnnnnnnnnnnnnnnnnnnnnnnnnnnnnnnnnnnnnnnnnnnnnnnnnnnnnnnnnnnnnnnnnnnnnnnnnnnnnnnnnnnnnnnnnnnnnnnnnnnnnnnnnnnnnnnnnnnnnnnnnnnnnnnnnnnnnnnnnnnnnnnnnnnnnnnnnnnnnnnnnnnnnnnnnnnnnnnnnnnnnnnnnnnnnnnnnnnnnnnnnnnnnnnnnnnnnnnnnnnnnnnnnnnnnnnnnnnnnnnnnnnnnnnnnnnnnnnnnnnnnnnnnnnnnnnnnnnnnnnnnnnnnnnnnnnnnnnnnnnnnnnnnnnnnnnnnnnnnnnnnnnnnnnnnnnnnnnnnnnnnnnnnnnnnnnnnnnnnnnnnnnnnnnnnnnnnnnnnnnnnnnnnnnnnnnnnnnnnnnnnnnnnnnnnnnnnnnnnnnnnnnnnnnnnnnnnnnnnnnnnnnnnnnnnnnnnnnnnnnnnnnnnnnnnnnnnnnnnnnnnnnnnnnnnnnnnnnnnnnnnnnnnnnnnnnnnnnnnnnnnnnnnnnnnnnnnnnnnnnnnnnnnnnnnnnnnnnnnnnnnnnnnnnnnnnnnnnnnnnnnnnnnnnnnnnnnnnnnnnnnnnnnnnnnnnnnnnnnnnnnnnnnnnnnnnnnnnnnnnnnnnnnnnnnnnnnnnnnnnnnnnnnnnnnnnnnnnnnnnnnnnnnnnnnnnnnnnnnnnnnnnnnnnnnnnnnnnnnnnnnnnnnnnnnnnnnnnnnnnnnnnnnnnnnnnnnnnnnnnnnnnnnnnnnnnnnnnnnnnnnnnnnnnnnnnnnnnnnnnnnnnnnnnnnnnnnnnnnnnnnnnnnnnnnnnnnnnnnnnnnnnnnnnnnnnnnnnnnnnnnnnnnnnnnnnnnnnnnnnnnnnnnnnnnnnnnnnnnnnnnnnnnnnnnnnnnnnnnnnnnnnnnnnnnnnnnnnnnnnnnnnnnnnnnnnnnnnnnnnnnnnnnnnnnnnnnnnnnnnnnnnnnnnnnnnnnnnnnnnnnnnnnnnnnnnnnnnnnnnnnnnnnnnnnnnnnnnnnnnnnnnnnnnnnnnnnnnnnnnnnnnnnnnnnnnnnnnnnnnnnnnnnnnnnnnnnnnnnnnnnnnnnnnnnnnnnnnnnnnnnnnnnnnnnnnnnnnnnnnnnnnnnnnnnnnnnnnnnnnnnnnnnnnnnnnnnnnnnnnnnnnnnnnnnnnnnnnnnnnnnnnnnnnnnnnnnnnnnnnnnnnnnnnnnnnnnnnnnnnnnnnnnnnnnnnnnnnnnnnnnnnnnnnnnnnnnnnnnnnnnnnnnnnnnnnnnnnnnnnnnnnnnnnnnnnnnnnnnnnnnnnnnnnnnnnnnnnnnnnnnnnnnnnnnnnnnnnnnnnnnnnnnnnnnnnnnnnnnnnnnnnnnnnnnnnnnnnnnnnnnnnnnnnnnnnnnnnnnnnnnnnnnnnnnnnnnnnnnnnnnnnnnnnnnnnnnnnnnnnnnnnnnnnnnnnnnnnnnnnnnnnnnnnnnnnnnnnnnnnnnnnnnnnnnnnnnnnnnnnnnnnnnnnnnnnnnnnnnnnnnnnnnnnnnnnnnnnnnnnnnnnnnnnnnnnnnnnnnnnnnnnnnnnnnnnnnnnnnnnnnnnnnnnnnnnnnnnnnnnnnnnnnnnnnnnnnnnnnnnnnnnnnnnnnnnnnnnnnnnnnnnnnnnnnnnnnnnnnnnnnnnnnnnnnnnnnnnnnnnnnnnnnnnnnnnnnnnnnnnnnnnnnnnnnnnnnnnnnnnnnnnnnnnnnnnnnnnnnnnnnnnnnnnnnnnnnnnnnnnnnnnnnnnnnnnnnnnnnnnnnnnnnnnnnnnnnnnnnnnnnnnnnnnnnnnnnnnnnnnnnnnnnnnnnnnnnnnnnnnnnnnnnnnnnnnnnnnnnnnnnnnnnnnnnnnnnnnnnnnnnnnnnnnnnnnnnnnnnnnnnnnnnnnnnnnnnnnnnnnnnnnnnnnnnnnnnnnnnnnnnnnnnnnnnnnnnnnnnnnnnnnnnnnnnnnnnnnnnnnnnnnnnnnnnnnnnnnnnnnnnnnnnnnnnnnnnnnnnnnnnnnnnnnnnnnnnnnnnnnnnnnnnnnnnnnnnnnnnnnnnnnnnnnnnnnnnnnnnnnnnnnnnnnnnnnnnnnnnnnnnnnnnnnnnnnnnnnnnnnnnnnnnnnnnnnnnnnnnnnnnnnnnnnnnnnnnnnnnnnnnnnnnnnnnnnnnnnnnnnnnnnnnnnnnnnnnnnnnnnnnnnnnnnnnnnnnnnnnnnnnnnnnnnnnnnnnnnnnnnnnnnnnnnnnnnnnnnnnnnnnnnnnnnnnnnnnnnnnnnnnnnnnnnnnnnnnnnnnnnnnnnnnnnnnnnnnnnnnnnnnnnnnnnnnnnnnnnnnnnnnnnnnnnnnnnnnnnnnnnnnnnnnnnnnnnnnnnnnnnnnnnnnnnnnnnnnnnnnnnnnnnnnnnnnnnnnnnnnnnnnnnnnnnnnnnnnnnnnnnnnnnnnnnnnnnnnnnnnnnnnnnnnnnnnnnnnnnnnnnnnnnnnnnnnnnnnnnnnnnnnnnnnnnnnnnnnnnnnnnnnnnnnnnnnnnnnnnnnnnnnnnnnnnnnnnnnnnnnnnnnnnnnnnnnnnnnnnnnnnnnnnnnnnnnnnnnnnnnnnnnnnnnnnnnnnnnnnnnnnnnnnnnnnnnnnnnnnnnnnnnnnnnnnnnnnnnnnnnnnnnnnnnnnnnnnnnnnnnnnnnnnnnnnnnnnnnnnnnnnnnnnnnnnnnnnnnnnnnnnnnnnnnnnnnnnnnnnnnnnnnnnnnnnnnnnnnnnnnnnnnnnnnnnnnnnnnnnnnnnnnnnnnnnnnnnnnnnnnnnnnnnnnnnnnnnnnnnnnnnnnnnnnnnnnnnnnnnnnnnnnnnnnnnnnnnnnnnnnnnnnnnnnnnnnnnnnnnnnnnnnnnnnnnnnnnnnnnnnnnnnnnnnnnnnnnnnnnnnnnnnnnnnnnnnnnnnnnnnnnnnnnnnnnnnnnnnnnnnnnnnnnnnnnnnnnnnnnnnnnnnnnnnnnnnnnnnnnnnnnnnnnnnnnnnnnnnnnnnnnnnnnnnnnnnnnnnnnnnnnnnnnnnnnnnnnnnnnnnnnnnnnnnnnnnnnnnnnnnnnnnnnnnnnnnnnnnnnnnnnnnnnnnnnnnnnnnnnnnnnnnnnnnnnnnnnnnnnnnnnnnnnnnnnnnnnnnnnnnnnnnnnnnnnnnnnnnnnnnnnnnnnnnnnnnnnnnnnnnnnnnnnnnnnnnnnnnnnnnnnnnnnnnnnnnnnnnnnnnnnnnnnnnnnnnnnnnnnnnnnnnnnnnnnnnnnnnnnnnnnnnnnnnnnnnnnnnnnnnnnnnnnnnnnnnnnnnnnnnnnnnnnnnnnnnnnnnnnnnnnnnnnnnnnnnnnnnnnnnnnnnnnnnnnnnnnnnnnnnnnnnnnnnnnnnnnnnnnnnnnnnnnnnnnnnnnnnnnnnnnnnnnnnnnnnnnnnnnnnnnnnnnnnnnnnnnnnnnnnnnnnnnnnnnnnnnnnnnnnnnnnnnnnnnnnnnnnnnnnnnnnnnnnnnnnnnnnnnnnnnnnnnnnnnnnnnnnnnnnnnnnnnnnnnnnnnnnnnnnnnnnnnnnnnnnnnnnnnnnnnnnnnnnnnnnnnnnnnnnnnnnnnnnnnnnnnnnnnnnnnnnnnnnnnnnnnnnnnnnnnnnnnnnnnnnnnnnnnnnnnnnnnnnnnnnnnnnnnnnnnnnnnnnnnnnnnnnnnnnnnnnnnnnnnnnnnnnnnnnnnnnnnnnnnnnnnnnnnnnnnnnnnnnnnnnnnnnnnnnnnnnnnnnnnnnnnnnnnnnnnnnnnnnnnnnnnnnnnnnnnnnnnnnnnnnnnnnnnnnnnnnnnnnnnnnnnnnnnnnnnnnnnnnnnnnnnnnnnnnnnnnnnnnnnnnnnnnnnnnnnnnnnnnnnnnnnnnnnnnnnnnnnnnnnnnnnnnnnnnnnnnnnnnnnnnnnnnnnnnnnnnnnnnnnnnnnnnnnnnnnnnnnnnnnnnnnnnnnnnnnnnnnnnnnnnnnnnnnnnnnnnnnnnnnnnnnnnnnnnnnnnnnnnnnnnnnnnnnnnnnnnnnnnnnnnnnnnnnnnnnnnnnnnnnnnnnnnnnnnnnnnnnnnnnnnnnnnnnnnnnnnnnnnnnnnnnnnnnnnnnnnnnnnnnnnnnnnnnnnnnnnnnnnnnnnnnnnnnnnnnnnnnnnnnnnnnnnnnnnnnnnnnnnnnnnnnnnnnnnnnnnnnnnnnnnnnnnnnnnnnnnnnnnnnnnnnnnnnnnnnnnnnnnnnnnnnnnnnnnnnnnnnnnnnnnnnnnnnnnnnnnnnnnnnnnnnnnnnnnnnnnnnnnnnnnnnnnnnnnnnnnnnnnnnnnnnnnnnnnnnnnnnnnnnnnnnnnnnnnnnnnnnnnnnnnnnnnnnnnnnnnnnnnnnnnnnnnnnnnnnnnnnnnnnnnnnnnnnnnnnnnnnnnnnnnnnnnnnnnnnnnnnnnnnnnnnnnnnnnnnnnnnnnnnnnnnnnnnnnnnnnnnnnnnnnnnnnnnnnnnnnnnnnnnnnnnnnnnnnnnnnnnnnnnnnnnnnnnnnnnnnnnnnnnnnnnnnnnnnnnnnnnnnnnnnnnnnnnnnnnnnnnnnnnnnnnnnnnnnnnnnnnnnnnnnnnnnnnnnnnnnnnnnnnnnnnnnnnnnnnnnnnnnnnnnnnnnnnnnnnnnnnnnnnnnnnnnnnnnnnnnnnnnnnnnnnnnnnnnnnnnnnnnnnnnnnnnnnnnnnnnnnnnnnnnnnnnnnnnnnnnnnnnnnnnnnnnnnnnnnnnnnnnnnnnnnnnnnnnnnnnnnnnnnnnnnnnnnnnnnnnnnnnnnnnnnnnnnnnnnnnnnnnnnnnnnnnnnnnnnnnnnnnnnnnnnnnnnnnnnnnnnnnnnnnnnnnnnnnnnnnnnnnnnnnnnnnnnnnnnnnnnnnnnnnnnnnnnnnnnnnnnnnnnnnnnnnnnnnnnnnnnnnnnnnnnnnnnnnnnnnnnnnnnnnnnnnnnnnnnnnnnnnnnnnnnnnnnnnnnnnnnnnnnnnnnnnnnnnnnnnnnnnnnnnnnnnnnnnnnnnnnnnnnnnnnnnnnnnnnnnnnnnnnnnnnnnnnnnnnnnnnnnnnnnnnnnnnnnnnnnnnnnnnnnnnnnnnnnnnnnnnnnnnnnnnnnnnnnnnnnnnnnnnnnnnnnnnnnnnnnnnnnnnnnnnnnnnnnnnnnnnnnnnnnnnnnnnnnnnnnnnnnnnnnnnnnnnnnnnnnnnnnnnnnnnnnnnnnnnnnnnnnnnnnnnnnnnnnnnnnnnnnnnnnnnnnnnnnnnnnnnnnnnnnnnnnnnnnnnnnnnnnnnnnnnnnnnnnnnnnnnnnnnnnnnnnnnnnnnnnnnnnnnnnnnnnnnnnnnnnnnnnnnnnnnnnnnnnnnnnnnnnnnnnnnnnnnnnnnnnnnnnnnnnnnnnnnnnnnnnnnnnnnnnnnnnnnnnnnnnnnnnnnnnnnnnnnnnnnnnnnnnnnnnnnnnnnnnnnnnnnnnnnnnnnnnnnnnnnnnnnnnnnnnnnnnnnnnnnnnnnnnnnnnnnnnnnnnnnnnnnnnnnnnnnnnnnnnnnnnnnnnnnnnnnnnnnnnnnnnnnnnnnnnnnnnnnnnnnnnnnnnnnnnnnnnnnnnnnnnnnnnnnnnnnnnnnnnnnnnnnnnnnnnnnnnnnnnnnnnnnnnnnnnnnnnnnnnnnnnnnnnnnnnnnnnnnnnnnnnnnnnnnnnnnnnnnnnnnnnnnnnnnnnnnnnnnnnnnnnnnnnnnnnnnnnnnnnnnnnnnnnnnnnnnnnnnnnnnnnnnnnnnnnnnnnnnnnnnnnnnnnnnnnnnnnnnnnnnnnnnnnnnnnnnnnnnnnnnnnnnnnnnnnnnnnnnnnnnnnnnnnnnnnnnnnnnnnnnnnnnnnnnnnnnnnnnnnnnnnnnnnnnnnnnnnnnnnnnnnnnnnnnnnnnnnnnnnnnnnnnnnnnnnnnnnnnnnnnnnnnnnnnnnnnnnnnnnnnnnnnnnnnnnnnnnnnnnnnnnnnnnnnnnnnnnnnnnnnnnnnnnnnnnnnnnnnnnnnnnnnnnnnnnnnnnnnnnnnnnnnnnnnnnnnnnnnnnnnnnnnnnnnnnnnnnnnnnnnnnnnnnnnnnnnnnnnnnnnnnnnnnnnnnnnnnnnnnnnnnnnnnnnnnnnnnnnnnnnnnnnnnnnnnnnnnnnnnnnnnnnnnnnnnnnnnnnnnnnnnnnnnnnnnnnnnnnnnnnnnnnnnnnnnnnnnnnnnnnnnnnnnnnnnnnnnnnnnnnnnnnnnnnnnnnnnnnnnnnnnnnnnnnnnnnnnnnnnnnnnnnnnnnnnnnnnnnnnnnnnnnnnnnnnnnnnnnnnnnnnnnnnnnnnnnnnnnnnnnnnnnnnnnnnnnnnnnnnnnnnnnnnnnnnnnnnnnnnnnnnnnnnnnnnnnnnnnnnnnnnnnnnnnnnnnnnnnnnnnnnnnnnnnnnnnnnnnnnnnnnnnnnnnnnnnnnnnnnnnnnnnnnnnnnnnnnnnnnnnnnnnnnnnnnnnnnnnnnnnnnnnnnnnnnnnnnnnnnnnnnnnnnnnnnnnnnnnnnnnnnnnnnnnnnnnnnnnnnnnnnnnnnnnnnnnnnnnnnnnnnnnnnnnnnnnnnnnnnnnnnnnnnnnnnnnnnnnnnnnnnnnnnnnnnnnnnnnnnnnnnnnnnnnnnnnnnnnnnnnnnnnnnnnnnnnnnnnnnnnnnnnnnnnnnnnnnnnnnnnnnnnnnnnnnnnnnnnnnnnnnnnnnnnnnnnnnnnnnnnnnnnnnnnnnnnnnnnnnnnnnnnnnnnnnnnnnnnnnnnnnnnnnnnnnnnnnnnnnnnnnnnnnnnnnnnnnnnnnnnnnnnnnnnnnnnnnnnnnnnnnnnnnnnnnnnnnnnnnnnnnnnnnnnnnnnnnnnnnnnnnnnnnnnnnnnnnnnnnnnnnnnnnnnnnnnnnnnnnnnnnnnnnnnnnnnnnnnnnnnnnnnnnnnnnnnnnnnnnnnnnnnnnnnnnnnnnnnnnnnnnnnnnnnnnnnnnnnnnnnnnnnnnnnnnnnnnnnnnnnnnnnnnnnnnnnnnnnnnnnnnnnnnnnnnnnnnnnnnnnnnnnnnnnnnnnnnnnnnnnnnnnnnnnnnnnnnnnnnnnnnnnnnnnnnnnnnnnnnnnnnnnnnnnnnnnnnnnnnnnnnnnnnnnnnnnnnnnnnnnnnnnnnnnnnnnnnnnnnnnnnnnnnnnnnnnnnnnnnnnnnnnnnnnnnnnnnnnnnnnnnnnnnnnnnnnnnnnnnnnnnnnnnnnnnnnnnnnnnnnnnnnnnnnnnnnnnnnnnnnnnnnnnnnnnnnnnnnnnnnnnnnnnnnnnnnnnnnnnnnnnnnnnnnnnnnnnnnnnnnnnnnnnnnnnnnnnnnnnnnnnnnnnnnnnnnnnnnnnnnnnnnnnnnnnnnnnnnnnnnnnnnnnnnnnnnnnnnnnnnnnnnnnnnnnnnnnnnnnnnnnnnnnnnnnnnnnnnnnnnnnnnnnnnnnnnnnnnnnnnnnnnnnnnnnnnnnnnnnnnnnnnnnnnnnnnnnnnnnnnnnnnnnnnnnnnnnnnnnnnnnnnnnnnnnnnnnnnnnnnnnnnnnnnnnnnnnnnnnnnnnnnnnnnnnnnnnnnnnnnnnnnnnnnnnnnnnnnnnnnnnnnnnnnnnnnnnnnnnnnnnnnnnnnnnnnnnnnnnnnnnnnnnnnnnnnnnnnnnnnnnnnnnnnnnnnnnnnnnnnnnnnnnnnnnnnnnnnnnnnnnnnnnnnnnnnnnnnnnnnnnnnnnnnnnnnnnnnnnnnnnnnnnnnnnnnnnnnnnnnnnnnnnnnnnnnnnnnnnnnnnnnnnnnnnnnnnnnnnnnnnnnnnnnnnnnnnnnnnnnnnnnnnnnnnnnnnnnnnnnnnnnnnnnnnnnnnnnnnnnnnnnnnnnnnnnnnnnnnnnnnnnnnnnnnnnnnnnnnnnnnnnnnnnnnnnnnnnnnnnnnnnnnnnnnnnnnnnnnnnnnnnnnnnnnnnnnnnnnnnnnnnnnnnnnnnnnnnnnnnnnnnnnnnnnnnnnnnnnnnnnnnnnnnnnnnnnnnnnnnnnnnnnnnnnnnnnnnnnnnnnnnnnnnnnnnnnnnnnnnnnnnnnnnnnnnnnnnnnnnnnnnnnnnnnnnnnnnnnnnnnnnnnnnnnnnnnnnnnnnnnnnnnnnnnnnnnnnnnnnnnnnnnnnnnnnnnnnnnnnnnnnnnnnnnnnnnnnnnnnnnnnnnnnnnnnnnnnnnnnnnnnnnnnnnnnnnnnnnnnnnnnnnnnnnnnnnnnnnnnnnnnnnnnnnnnnnnnnnnnnnnnnnnnnnnnnnnnnnnnnnnnnnnnnnnnnnnnnnnnnnnnnnnnnnnnnnnnnnnnnnnnnnnnnnnnnnnnnnnnnnnnnnnnnnnnnnnnnnnnnnnnnnnnnnnnnnnnnnnnnnnnnnnnnnnnnnnnnnnnnnnnnnnnnnnnnnnnnnnnnnnnnnnnnnnnnnnnnnnnnnnnnnnnnnnnnnnnnnnnnnnnnnnnnnnnnnnnnnnnnnnnnnnnnnnnnnnnnnnnnnnnnnnnnnnnnnnnnnnnnnnnnnnnnnnnnnnnnnnnnnnnnnnnnnnnnnnnnnnnnnnnnnnnnnnnnnnnnnnnnnnnnnnnnnnnnnnnnnnnnnnnnnnnnnnnnnnnnnnnnnnnnnnnnnnnnnnnnnnnnnnnnnnnnnnnnnnnnnnnnnnnnnnnnnnnnnnnnnnnnnnnnnnnnnnnnnnnnnnnnnnnnnnnnnnnnnnnnnnnnnnnnnnnnnnnnnnnnnnnnnnnnnnnnnnnnnnnnnnnnnnnnnnnnnnnnnnnnnnnnnnnnnnnnnnnnnnnnnnnnnnnnnnnnnnnnnnnnnnnnnnnnnnnnnnnnnnnnnnnnnnnnnnnnnnnnnnnnnnnnnnnnnnnnnnnnnnnnnnnnnnnnnnnnnnnnnnnnnnnnnnnnnnnnnnnnnnnnnnnnnnnnnnnnnnnnnnnnnnnnnnnnnnnnnnnnnnnnnnnnnnnnnnnnnnnnnnnnnnnnnnnnnnnnnnnnnnnnnnnnnnnnnnnnnnnnnnnnnnnnnnnnnnnnnnnnnnnnnnnnnnnnnnnnnnnnnnnnnnnnnnnnnnnnnnnnnnnnnnnnnnnnnnnnnnnnnnnnnnnnnnnnnnnnnnnnnnnnnnnnnnnnnnnnnnnnnnnnnnnnnnnnnnnnnnnnnnnnnnnnnnnnnnnnnnnnnnnnnnnnnnnnnnnnnnnnnnnnnnnnnnnnnnnnnnnnnnnnnnnnnnnnnnnnnnnnnnnnnnnnnnnnnnnnnnnnnnnnnnnnnnnnnnnnnnnnnnnnnnnnnnnnnnnnnnnnnnnnnnnnnnnnnnnnnnnnnnnnnnnnnnnnnnnnnnnnnnnnnnnnnnnnnnnnnnnnnnnnnnnnnnnnnnnnnnnnnnnnnnnnnnnnnnnnnnnnnnnnnnnnnnnnnnnnnnnnnnnnnnnnnnnnnnnnnnnnnnnnnnnnnnnnnnnnnnnnnnnnnnnnnnnnnnnnnnnnnnnnnnnnnnnnnnnnnnnnnnnnnnnnnnnnnnnnnnnnnnnnnnnnnnnnnnnnnnnnnnnnnnnnnnnnnnnnnnnnnnnnnnnnnnnnnnnnnnnnnnnnnnnnnnnnnnnnnnnnnnnnnnnnnnnnnnnnnnnnnnnnnnnnnnnnnnnnnnnnnnnnnnnnnnnnnnnnnnnnnnnnnnnnnnnnnnnnnnnnnnnnnnnnnnnnnnnnnnnnnnnnnnnnnnnnnnnnnnnnnnnnnnnnnnnnnnnnnnnnnnnnnnnnnnnnnnnnnnnnnnnnnnnnnnnnnnnnnnnnnnnnnnnnnnnnnnnnnnnnnnnnnnnnnnnnnnnnnnnnnnnnnnnnnnnnnnnnnnnnnnnnnnnnnnnnnnnnnnnnnnnnnnnnnnnnnnnnnnnnnnnnnnnnnnnnnnnnnnnnnnnnnnnnnnnnnnnnnnnnnnnnnnnnnnnnnnnnnnnnnnnnnnnnnnnnnnnnnnnnnnnnnnnnnnnnnnnnnnnnnnnnnnnnnnnnnnnnnnnnnnnnnnnnnnnnnnnnnnnnnnnnnnnnnnnnnnnnnnnnnnnnnnnnnnnnnnnnnnnnnnnnnnnnnnnnnnnnnnnnnnnnnnnnnnnnnnnnnnnnnnnnnnnnnnnnnnnnnnnnnnnnnnnnnnnnnnnnnnnnnnnnnnnnnnnnnnnnnnnnnnnnnnnnnnnnnnnnnnnnnnnnnnnnnnnnnnnnnnnnnnnnnnnnnnnnnnnnnnnnnnnnnnnnnnnnnnnnnnnnnnnnnnnnnnnnnnnnnnnnnnnnnnnnnnnnnnnnnnnnnnnnnnnnnnnnnnnnnnnnnnnnnnnnnnnnnnnnnnnnnnnnnnnnnnnnnnnnnnnnnnnnnnnnnnnnnnnnnnnnnnnnnnnnnnnnnnnnnnnnnnnnnnnnnnnnnnnnnnnnnnnnnnnnnnnnnnnnnnnnnnnnnnnnnnnnnnnnnnnnnnnnnnnnnnnnnnnnnnnnnnnnnnnnnnnnnnnnnnnnnnnnnnnnnnnnnnnnnnnnnnnnnnnnnnnnnnnnnnnnnnnnnnnnnnnnnnnnnnnnnnnnnnnnnnnnnnnnnnnnnnnnnnnnnnnnnnnnnnnnnnnnnnnnnnnnnnnnnnnnnnnnnnnnnnnnnnnnnnnnnnnnnnnnnnnnnnnnnnnnnnnnnnnnnnnnnnnnnnnnnnnnnnnnnnnnnnnnnnnnnnnnnnnnnnnnnnnnnnnnnnnnnnnnnnnnnnnnnnnnnnnnnnnnnnnnnnnnnnnnnnnnnnnnnnnnnnnnnnnnnnnnnnnnnnnnnnnnnnnnnnnnnnnnnnnnnnnnnnnnnnnnnnnnnnnnnnnnnnnnnnnnnnnnnnnnnnnnnnnnnnnnnnnnnnnnnnnnnnnnnnnnnnnnnnnnnnnnnnnnnnnnnnnnnnnnnnnnnnnnnnnnnnnnnnnnnnnnnnnnnnnnnnnnnnnnnnnnnnnnnnnnnnnnnnnnnnnnnnnnnnnnnnnnnnnnnnnnnnnnnnnnnnnnnnnnnnnnnnnnnnnnnnnnnnnnnnnnnnnnnnnnnnnnnnnnnnnnnnnnnnnnnnnnnnnnnnnnnnnnnnnnnnnnnnnnnnnnnnnnnnnnnnnnnnnnnnnnnnnnnnnnnnnnnnnnnnnnnnnnnnnnnnnnnnnnnnnnnnnnnnnnnnnnnnnnnnnnnnnnnnnnnnnnnnnnnnnnnnnnnnnnnnnnnnnnnnnnnnnnnnnnnnnnnnnnnnnnnnnnnnnnnnnnnnnnnnnnnnnnnnnnnnnnnnnnnnnnnnnnnnnnnnnnnnnnnnnnnnnnnnnnnnnnnnnnnnnnnnnnnnnnnnnnnnnnnnnnnnnnnnnnnnnnnnnnnnnnnnnnnnnnnnnnnnnnnnnnnnnnnnnnnnnnnnnnnnnnnnnnnnnnnnnnnnnnnnnnnnnnnnnnnnnnnnnnnnnnnnnnnnnnnnnnnnnnnnnnnnnnnnnnnnnnnnnnnnnnnnnnnnnnnnnnnnnnnnnnnnnnnnnnnnnnnnnnnnnnnnnnnnnnnnnnnnnnnnnnnnnnnnnnnnnnnnnnnnnnnnnnnnnnnnnnnnnnnnnnnnnnnnnnnnnnnnnnnnnnnnnnnnnnnnnnnnnnnnnnnnnnnnnnnnnnnnnnnnnnnnnnnnnnnnnnnnnnnnnnnnnnnnnnnnnnnnnnnnnnnnnnnnnnnnnnnnnnnnnnnnnnnnnnnnnnnnnnnnnnnnnnnnnnnnnnnnnnnnnnnnnnnnnnnnnnnnnnnnnnnnnnnnnnnnnnnnnnnnnnnnnnnnnnnnnnnnnnnnnnnnnnnnnnnnnnnnnnnnnnnnnnnnnnnnnnnnnnnnnnnnnnnnnnnnnnnnnnnnnnnnnnnnnnnnnnnnnnnnnnnnnnnnnnnnnnnnnnnnnnnnnnnnnnnnnnnnnnnnnnnnnnnnnnnnnnnnnnnnnnnnnnnnnnnnnnnnnnnnnnnnnnnnnnnnnnnnnnnnnnnnnnnnnnnnnnnnnnnnnnnnnnnnnnnnnnnnnnnnnnnnnnnnnnnnnnnnnnnnnnnnnnnnnnnnnnnnnnnnnnnnnnnnnnnnnnnnnnnnnnnnnnnnnnnnnnnnnnnnnnnnnnnnnnnnnnnnnnnnnnnnnnnnnnnnnnnnnnnnnnnnnnnnnnnnnnnnnnnnnnnnnnnnnnnnnnnnnnnnnnnnnnnnnnnnnnnnnnnnnnnnnnnnnnnnnnnnnnnnnnnnnnnnnnnnnnnnnnnnnnnnnnnnnnnnnnnnnnnnnnnnnnnnnnnnnnnnnnnnnnnnnnnnnnnnnnnnnnnnnnnnnnnnnnnnnnnnnnnnnnnnnnnnnnnnnnnnnnnnnnnnnnnnnnnnnnnnnnnnnnnnnnnnnnnnnnnnnnnnnnnnnnnnnnnnnnnnnnnnnnnnnnnnnnnnnnnnnnnnnnnnnnnnnnnnnnnnnnnnnnnnnnnnnnnnnnnnnnnnnnnnnnnnnnnnnnnnnnnnnnnnnnnnnnnnnnnnnnnnnnnnnnnnnnnnnnnnnnnnnnnnnnnnnnnnnnnnnnnnnnnnnnnnnnnnnnnnnnnnnnnnnnnnnnnnnnnnnnnnnnnnnnnnnnnnnnnnnnnnnnnnnnnnnnnnnnnnnnnnnnnnnnnnnnnnnnnnnnnnnnnnnnnnnnnnnnnnnnnnnnnnnnnnnnnnnnnnnnnnnnnnnnnnnnnnnnnnnnnnnnnnnnnnnnnnnnnnnnnnnnnnnnnnnnnnnnnnnnnnnnnnnnnnnnnnnnnnnnnnnnnnnnnnnnnnnnnnnnnnnnnnnnnnnnnnnnnnnnnnnnnnnnnnnnnnnnnnnnnnnnnnnnnnnnnnnnnnnnnnnnnnnnnnnnnnnnnnnnnnnnnnnnnnnnnnnnnnnnnnnnnnnnnnnnnnnnnnnnnnnnnnnnnnnnnnnnnnnnnnnnnnnnnnnnnnnnnnnnnnnnnnnnnnnnnnnnnnnnnnnnnnnnnnnnnnnnnnnnnnnnnnnnnnnnnnnnnnnnnnnnnnnnnnnnnnnnnnnnnnnnnnnnnnnnnnnnnnnnnnnnnnnnnnnnnnnnnnnnnnnnnnnnnnnnnnnnnnnnnnnnnnnnnnnnnnnnnnnnnnnnnnnnnnnnnnnnnnnnnnnnnnnnnnnnnnnnnnnnnnnnnnnnnnnnnnnnnnnnnnnnnnnnnnnnnnnnnnnnnnnnnnnnnnnnnnnnnnnnnnnnnnnnnnnnnnnnnnnnnnnnnnnnnnnnnnnnnnnnnnnnnnnnnnnnnnnnnnnnnnnnnnnnnnnnnnnnnnnnnnnnnnnnnnnnnnnnnnnnnnnnnnnnnnnnnnnnnnnnnnnnnnnnnnnnnnnnnnnnnnnnnnnnnnnnnnnnnnnnnnnnnnnnnnnnnnnnnnnnnnnnnnnnnnnnnnnnnnnnnnnnnnnnnnnnnnnnnnnnnnnnnnnnnnnnnnnnnnnnnnnnnnnnnnnnnnnnnnnnnnnnnnnnnnnnnnnnnnnnnnnnnnnnnnnnnnnnnnnnnnnnnnnnnnnnnnnnnnnnnnnnnnnnnnnnnnnnnnnnnnnnnnnnnnnnnnnnnnnnnnnnnnnnnnnnnnnnnnnnnnnnnnnnnnnnnnnnnnnnnnnnnnnnnnnnnnnnnnnnnnnnnnnnnnnnnnnnnnnnnnnnnnnnnnnnnnnnnnnnnnnnnnnnnnnnnnnnnnnnnnnnnnnnnnnnnnnnnnnnnnnnnnnnnnnnnnnnnnnnnnnnnnnnnnnnnnnnnnnnnnnnnnnnnnnnnnnnnnnnnnnnnnnnnnnnnnnnnnnnnnnnnnnnnnnnnnnnnnnnnnnnnnnnnnnnnnnnnnnnnnnnnnnnnnnnnnnnnnnnnnnnnnnnnnnnnnnnnnnnnnnnnnnnnnnnnnnnnnnnnnnnnnnnnnnnnnnnnnnnnnnnnnnnnnnnnnnnnnnnnnnnnnnnnnnnnnnnnnnnnnnnnnnnnnnnnnnnnnnnnnnnnnnnnnnnnnnnnnnnnnnnnnnnnnnnnnnnnnnnnnnnnnnnnnnnnnnnnnnnnnnnnnnnnnnnnnnnnnnnnnnnnnnnnnnnnnnnnnnnnnnnnnnnnnnnnnnnnnnnnnnnnnnnnnnnnnnnnnnnnnnnnnnnnnnnnnnnnnnnnnnnnnnnnnnnnnnnnnnnnnnnnnnnnnnnnnnnnnnnnnnnnnnnnnnnnnnnnnnnnnnnnnnnnnnnnnnnnnnnnnnnnnnnnnnnnnnnnnnnnnnnnnnnnnnnnnnnnnnnnnnnnnnnnnnnnnnnnnnnnnnnnnnnnnnnnnnnnnnnnnnnnnnnnnnnnnnnnnnnnnnnnnnnnnnnnnnnnnnnnnnnnnnnnnnnnnnnnnnnnnnnnnnnnnnnnnnnnnnnnnnnnnnnnnnnnnnnnnnnnnnnnnnnnnnnnnnnnnnnnnnnnnnnnnnnnnnnnnnnnnnnnnnnnnnnnnnnnnnnnnnnnnnnnnnnnnnnnnnnnnnnnnnnnnnnnnnnnnnnnnnnnnnnnnnnnnnnnnnnnnnnnnnnnnnnnnnnnnnnnnnnnnnnnnnnnnnnnnnnnnnnnnnnnnnnnnnnnnnnnnnnnnnnnnnnnnnnnnnnnnnnnnnnnnnnnnnnnnnnnnnnnnnnnnnnnnnnnnnnnnnnnnnnnnnnnnnnnnnnnnnnnnnnnnnnnnnnnnnnnnnnnnnnnnnnnnnnnnnnnnnnnnnnnnnnnnnnnnnnnnnnnnnnnnnnnnnnnnnnnnnnnnnnnnnnnnnnnnnnnnnnnnnnnnnnnnnnnnnnnnnnnnnnnnnnnnnnnnnnnnnnnnnnnnnnnnnnnnnnnnnnnnnnnnnnnnnnnnnnnnnnnnnnnnnnnnnnnnnnnnnnnnnnnnnnnnnnnnnnnnnnnnnnnnnnnnnnnnnnnnnnnnnnnnnnnnnnnnnnnnnnnnnnnnnnnnnnnnnnnnnnnnnnnnnnnnnnnnnnnnnnnnnnnnnnnnnnnnnnnnnnnnnnnnnnnnnnnnnnnnnnnnnnnnnnnnnnnnnnnnnnnnnnnnnnnnnnnnnnnnnnnnnnnnnnnnnnnnnnnnnnnnnnnnnnnnnnnnnnnnnnnnnnnnnnnnnnnnnnnnnnnnnnnnnnnnnnnnnnnnnnnnnnnnnnnnnnnnnnnnnnnnnnnnnnnnnnnnnnnnnnnnnnnnnnnnnnnnnnnnnnnnnnnnnnnnnnnnnnnnnnnnnnnnnnnnnnnnnnnnnnnnnnnnnnnnnnnnnnnnnnnnnnnnnnnnnnnnnnnnnnnnnnnnnnnnnnnnnnnnnnnnnnnnnnnnnnnnnnnnnnnnnnnnnnnnnnnnnnnnnnnnnnnnnnnnnnnnnnnnnnnnnnnnnnnnnnnnnnnnnnnnnnnnnnnnnnnnnnnnnnnnnnnnnnnnnnnnnnnnnnnnnnnnnnnnnnnnnnnnnnnnnnnnnnnnnnnnnnnnnnnnnnnnnnnnnnnnnnnnnnnnnnnnnnnnnnnnnnnnnnnnnnnnnnnnnnnnnnnnnnnnnnnnnnnnnnnnnnnnnnnnnnnnnnnnnnnnnnnnnnnnnnnnnnnnnnnnnnnnnnnnnnnnnnnnnnnnnnnnnnnnnnnnnnnnnnnnnnnnnnnnnnnnnnnnnnnnnnnnnnnnnnnnnnnnnnnnnnnnnnnnnnnnnnnnnnnnnnnnnnnnnnnnnnnnnnnnnnnnnnnnnnnnnnnnnnnnnnnnnnnnnnnnnnnnnnnnnnnnnnnnnnnnnnnnnnnnnnnnnnnnnnnnnnnnnnnnnnnnnnnnnnnnnnnnnnnnnnnnnnnnnnnnnnnnnnnnnnnnnnnnnnnnnnnnnnnnnnnnnnnnnnnnnnnnnnnnnnnnnnnnnnnnnnnnnnnnnnnnnnnnnnnnnnnnnnnnnnnnnnnnnnnnnnnnnnnnnnnnnnnnnnnnnnnnnnnnnnnnnnnnnnnnnnnnnnnnnnnnnnnnnnnnnnnnnnnnnnnnnnnnnnnnnnnnnnnnnnnnnnnnnnnnnnnnnnnnnnnnnnnnnnnnnnnnnnnnnnnnnnnnnnnnnnnnnnnnnnnnnnnnnnnnnnnnnnnnnnnnnnnnnnnnnnnnnnnnnnnnnnnnnnnnnnnnnnnnnnnnnnnnnnnnnnnnnnnnnnnnnnnnnnnnnnnnnnnnnnnnnnnnnnnnnnnnnnnnnnnnnnnnnnnnnnnnnnnnnnnnnnnnnnnnnnnnnnnnnnnnnnnnnnnnnnnnnnnnnnnnnnnnnnnnnnnnnnnnnnnnnnnnnnnnnnnnnnnnnnnnnnnnnnnnnnnnnnnnnnnnnnnnnnnnnnnnnnnnnnnnnnnnnnnnnnnnnnnnnnnnnnnnnnnnnnnnnnnnnnnnnnnnnnnnnnnnnnnnnnnnnnnnnnnnnnnnnnnnnnnnnnnnnnnnnnnnnnnnnnnnnnnnnnnnnnnnnnnnnnnnnnnnnnnnnnnnnnnnnnnnnnnnnnnnnnnnnnnnnnnnnnnnnnnnnnnnnnnnnnnnnnnnnnnnnnnnnnnnnnnnnnnnnnnnnnnnnnnnnnnnnnnnnnnnnnnnnnnnnnnnnnnnnnnnnnnnnnnnnnnnnnnnnnnnnnnnnnnnnnnnnnnnnnnnnnnnnnnnnnnnnnnnnnnnnnnnnnnnnnnnnnnnnnnnnnnnnnnnnnnnnnnnnnnnnnnnnnnnnnnnnnnnnnnnnnnnnnnnnnnnnnnnnnnnnnnnnnnnnnnnnnnnnnnnnnnnnnnnnnnnnnnnnnnnnnnnnnnnnnnnnnnnnnnnnnnnnnnnnnnnnnnnnnnnnnnnnnnnnnnnnnnnnnnnnnnnnnnnnnnnnnnnnnnnnnnnnnnnnnnnnnnnnnnnnnnnnnnnnnnnnnnnnnnnnnnnnnnnnnnnnnnnnnnnnnnnnnnnnnnnnnnnnnnnnnnnnnnnnnnnnnnnnnnnnnnnnnnnnnnnnnnnnnnnnnnnnnnnnnnnnnnnnnnnnnnnnnnnnnnnnnnnnnnnnnnnnnnnnnnnnnnnnnnnnnnnnnnnnnnnnnnnnnnnnnnnnnnnnnnnnnnnnnnnnnnnnnnnnnnnnnnnnnnnnnnnnnnnnnnnnnnnnnnnnnnnnnnnnnnnnnnnnnnnnnnnnnnnnnnnnnnnnnnnnnnnnnnnnnnnnnnnnnnnnnnnnnnnnnnnnnnnnnnnnnnnnnnnnnnnnnnnnnnnnnnnnnnnnnnnnnnnnnnnnnnnnnnnnnnnnnnnnnnnnnnnnnnnnnnnnnnnnnnnnnnnnnnnnnnnnnnnnnnnnnnnnnnnnnnnnnnnnnnnnnnnnnnnnnnnnnnnnnnnnnnnnnnnnnnnnnnnnnnnnnnnnnnnnnnnnnnnnnnnnnnnnnnnnnnnnnnnnnnnnnnnnnnnnnnnnnnnnnnnnnnnnnnnnnnnnnnnnnnnnnnnnnnnnnnnnnnnnnnnnnnnnnnnnnnnnnnnnnnnnnnnnnnnnnnnnnnnnnnnnnnnnnnnnnnnnnnnnnnnnnnnnnnnnnnnnnnnnnnnnnnnnnnnnnnnnnnnnnnnnnnnnnnnnnnnnnnnnnnnnnnnnnnnnnnnnnnnnnnnnnnnnnnnnnnnnnnnnnnnnnnnnnnnnnnnnnnnnnnnnnnnnnnnnnnnnnnnnnnnnnnnnnnnnnnnnnnnnnnnnnnnnnnnnnnnnnnnnnnnnnnnnnnnnnnnnnnnnnnnnnnnnnnnnnnnnnnnnnnnnnnnnnnnnnnnnnnnnnnnnnnnnnnnnnnnnnnnnnnnnnnnnnnnnnnnnnnnnnnnnnnnnnnnnnnnnnnnnnnnnnnnnnnnnnnnnnnnnnnnnnnnnnnnnnnnnnnnnnnnnnnnnnnnnnnnnnnnnnnnnnnnnnnnnnnnnnnnnnnnnnnnnnnnnnnnnnnnnnnnnnnnnnnnnnnnnnnnnnnnnnnnnnnnnnnnnnnnnnnnnnnnnnnnnnnnnnnnnnnnnnnnnnnnnnnnnnnnnnnnnnnnnnnnnnnnnnnnnnnnnnnnnnnnnnnnnnnnnnnnnnnnnnnnnnnnnnnnnnnnnnnnnnnnnnnnnnnnnnnnnnnnnnnnnnnnnnnnnnnnnnnnnnnnnnnnnnnnnnnnnnnnnnnnnnnnnnnnnnnnnnnnnnnnnnnnnnnnnnnnnnnnnnnnnnnnnnnnnnnnnnnnnnnnnnnnnnnnnnnnnnnnnnnnnnnnnnnnnnnnnnnnnnnnnnnnnnnnnnnnnnnnnnnnnnnnnnnnnnnnnnnnnnnnnnnnnnnnnnnnnnnnnnnnnnnnnnnnnnnnnnnnnnnnnnnnnnnnnnnnnnnnnnnnnnnnnnnnnnnnnnnnnnnnnnnnnnnnnnnnnnnnnnnnnnnnnnnnnnnnnnnnnnnnnnnnnnnnnnnnnnnnnnnnnnnnnnnnnnnnnnnnnnnnnnnnnnnnnnnnnnnnnnnnnnnnnnnnnnnnnnnnnnnnnnnnnnnnnnnnnnnnnnnnnnnnnnnnnnnnnnnnnnnnnnnnnnnnnnnnnnnnnnnnnnnnnnnnnnnnnnnnnnnnnnnnnnnnnnnnnnnnnnnnnnnnnnnnnnnnnnnnnnnnnnnnnnnnnnnnnnnnnnnnnnnnnnnnnnnnnnnnnnnnnnnnnnnnnnnnnnnnnnnnnnnnnnnnnnnnnnnnnnnnnnnnnnnnnnnnnnnnnnnnnnnnnnnnnnnnnnnnnnnnnnnnnnnnnnnnnnnnnnnnnnnnnnnnnnnnnnnnnnnnnnnnnnnnnnnnnnnnnnnnnnnnnnnnnnnnnnnnnnnnnnnnnnnnnnnnnnnnnnnnnnnnnnnnnnnnnnnnnnnnnnnnnnnnnnnnnnnnnnnnnnnnnnnnnnnnnnnnnnnnnnnnnnnnnnnnnnnnnnnnnnnnnnnnnnnnnnnnnnnnnnnnnnnnnnnnnnnnnnnnnnnnnnnnnnnnnnnnnnnnnnnnnnnnnnnnnnnnnnnnnnnnnnnnnnnnnnnnnnnnnnnnnnnnnnnnnnnnnnnnnnnnnnnnnnnnnnnnnnnnnnnnnnnnnnnnnnnnnnnnnnnnnnnnnnnnnnnnnnnnnnnnnnnnnnnnnnnnnnnnnnnnnnnnnnnnnnnnnnnnnnnnnnnnnnnnnnnnnnnnnnnnnnnnnnnnnnnnnnnnnnnnnnnnnnnnnnnnnnnnnnnnnnnnnnnnnnnnnnnnnnnnnnnnnnnnnnnnnnnnnnnnnnnnnnnnnnnnnnnnnnnnnnnnnnnnnnnnnnnnnnnnnnnnnnnnnnnnnnnnnnnnnnnnnnnnnnnnnnnnnnnnnnnnnnnnnnnnnnnnnnnnnnnnnnnnnnnnnnnnnnnnnnnnnnnnnnnnnnnnnnnnnnnnnnnnnnnnnnnnnnnnnnnnnnnnnnnnnnnnnnnnnnnnnnnnnnnnnnnnnnnnnnnnnnnnnnnnnnnnnnnnnnnnnnnnnnnnnnnnnnnnnnnnnnnnnnnnnnnnnnnnnnnnnnnnnnnnnnnnnnnnnnnnnnnnnnnnnnnnnnnnnnnnnnnnnnnnnnnnnnnnnnnnnnnnnnnnnnnnnnnnnnnnnnnnnnnnnnnnnnnnnnnnnnnnnnnnnnnnnnnnnnnnnnnnnnnnnnnnnnnnnnnnnnnnnnnnnnnnnnnnnnnnnnnnnnnnnnnnnnnnnnnnnnnnnnnnnnnnnnnnnnnnnnnnnnnnnnnnnnnnnnnnnnnnnnnnnnnnnnnnnnnnnnnnnnnnnnnnnnnnnnnnnnnnnnnnnnnnnnnnnnnnnnnnnnnnnnnnnnnnnnnnnnnnnnnnnnnnnnnnnnnnnnnnnnnnnnnnnnnnnnnnnnnnnnnnnnnnnnnnnnnnnnnnnnnnnnnnnnnnnnnnnnnnnnnnnnnnnnnnnnnnnnnnnnnnnnnnnnnnnnnnnnnnnnnnnnnnnnnnnnnnnnnnnnnnnnnnnnnnnnnnnnnnnnnnnnnnnnnnnnnnnnnnnnnnnnnnnnnnnnnnnnnnnnnnnnnnnnnnnnnnnnnnnnnnnnnnnnnnnnnnnnnnnnnnnnnnnnnnnnnnnnnnnnnnnnnnnnnnnnnnnnnnnnnnnnnnnnnnnnnnnnnnnnnnnnnnnnnnnnnnnnnnnnnnnnnnnnnnnnnnnnnnnnnnnnnnnnnnnnnnnnnnnnnnnnnnnnnnnnnnnnnnnnnnnnnnnnnnnnnnnnnnnnnnnnnnnnnnnnnnnnnnnnnnnnnnnnnnnnnnnnnnnnnnnnnnnnnnnnnnnnnnnnnnnnnnnnnnnnnnnnnnnnnnnnnnnnnnnnnnnnnnnnnnnnnnnnnnnnnnnnnnnnnnnnnnnnnnnnnnnnnnnnnnnnnnnnnnnnnnnnnnnnnnnnnnnnnnnnnnnnnnnnnnnnnnnnnnnnnnnnnnnnnnnnnnnnnnnnnnnnnnnnnnnnnnnnnnnnnnnnnnnnnnnnnnnnnnnnnnnnnnnnnnnnnnnnnnnnnnnnnnnnnnnnnnnnnnnnnnnnnnnnnnnnnnnnnnnnnnnnnnnnnnnnnnnnnnnnnnnnnnnnnnnnnnnnnnnnnnnnnnnnnnnnnnnnnnnnnnnnnnnnnnnnnnnnnnnnnnnnnnnnnnnnnnnnnnnnnnnnnnnnnnnnnnnnnnnnnnnnnnnnnnnnnnnnnnnnnnnnnnnnnnnnnnnnnnnnnnnnnnnnnnnnnnnnnnnnnnnnnnnnnnnnnnnnnnnnnnnnnnnnnnnnnnnnnnnnnnnnnnnnnnnnnnnnnnnnnnnnnnnnnnnnnnnnnnnnnnnnnnnnnnnnnnnnnnnnnnnnnnnnnnnnnnnnnnnnnnnnnnnnnnnnnnnnnnnnnnnnnnnnnnnnnnnnnnnnnnnnnnnnnnnnnnnnnnnnnnnnnnnnnnnnnnnnnnnnnnnnnnnnnnnnnnnnnnnnnnnnnnnnnnnnnnnnnnnnnnnnnnnnnnnnnnnnnnnnnnnnnnnnnnnnnnnnnnnnnnnnnnnnnnnnnnnnnnnnnnnnnnnnnnnnnnnnnnnnnnnnnnnnnnnnnnnnnnnnnnnnnnnnnnnnnnnnnnnnnnnnnnnnnnnnnnnnnnnnnnnnnnnnnnnnnnnnnnnnnnnnnnnnnnnnnnnnnnnnnnnnnnnnnnnnnnnnnnnnnnnnnnnnnnnnnnnnnnnnnnnnnnnnnnnnnnnnnnnnnnnnnnnnnnnnnnnnnnnnnnnnnnnnnnnnnnnnnnnnnnnnnnnnnnnnnnnnnnnnnnnnnnnnnnnnnnnnnnnnnnnnnnnnnnnnnnnnnnnnnnnnnnnnnnnnnnnnnnnnnnnnnnnnnnnnnnnnnnnnnnnnnnnnnnnnnnnnnnnnnnnnnnnnnnnnnnnnnnnnnnnnnnnnnnnnnnnnnnnnnnnnnnnnnnnnnnnnnnnnnnnnnnnnnnnnnnnnnnnnnnnnnnnnnnnnnnnnnnnnnnnnnnnnnnnnnnnnnnnnnnnnnnnnnnnnnnnnnnnnnnnnnnnnnnnnnnnnnnnnnnnnnnnnnnnnnnnnnnnnnnnnnnnnnnnnnnnnnnnnnnnnnnnnnnnnnnnnnnnnnnnnnnnnnnnnnnnnnnnnnnnnnnnnnnnnnnnnnnnnnnnnnnnnnnnnnnnnnnnnnnnnnnnnnnnnnnnnnnnnnnnnnnnnnnnnnnnnnnnnnnnnnnnnnnnnnnnnnnnnnnnnnnnnnnnnnnnnnnnnnnnnnnnnnnnnnnnnnnnnnnnnnnnnnnnnnnnnnnnnnnnnnnnnnnnnnnnnnnnnnnnnnnnnnnnnnnnnnnnnnnnnnnnnnnnnnnnnnnnnnnnnnnnnnnnnnnnnnnnnnnnnnnnnnnnnnnnnnnnnnnnnnnnnnnnnnnnnnnnnnnnnnnnnnnnnnnnnnnnnnnnnnnnnnnnnnnnnnnnnnnnnnnnnnnnnnnnnnnnnnnnnnnnnnnnnnnnnnnnnnnnnnnnnnnnnnnnnnnnnnnnnnnnnnnnnnnnnnnnnnnnnnnnnnnnnnnnnnnnnnnnnnnnnnnnnnnnnnnnnnnnnnnnnnnnnnnnnnnnnnnnnnnnnnnnnnnnnnnnnnnnnnnnnnnnnnnnnnnnnnnnnnnnnnnnnnnnnnnnnnnnnnnnnnnnnnnnnnnnnnnnnnnnnnnnnnnnnnnnnnnnnnnnnnnnnnnnnnnnnnnnnnnnnnnnnnnnnnnnnnnnnnnnnnnnnnnnnnnnnnnnnnnnnnnnnnnnnnnnnnnnnnnnnnnnnnnnnnnnnnnnnnnnnnnnnnnnnnnnnnnnnnnnnnnnnnnnnnnnnnnnnnnnnnnnnnnnnnnnnnnnnnnnnnnnnnnnnnnnnnnnnnnnnnnnnnnnnnnnnnnnnnnnnnnnnnnnnnnnnnnnnnnnnnnnnnnnnnnnnnnnnnnnnnnnnnnnnnnnnnnnnnnnnnnnnnnnnnnnnnnnnnnnnnnnnnnnnnnnnnnnnnnnnnnnnnnnnnnnnnnnnnnnnnnnnnnnnnnnnnnnnnnnnnnnnnnnnnnnnnnnnnnnnnnnnnnnnnnnnnnnnnnnnnnnnnnnnnnnnnnnnnnnnnnnnnnnnnnnnnnnnnnnnnnnnnnnnnnnnnnnnnnnnnnnnnnnnnnnnnnnnnnnnnnnnnnnnnnnnnnnnnnnnnnnnnnnnnnnnnnnnnnnnnnnnnnnnnnnnnnnnnnnnnnnnnnnnnnnnnnnnnnnnnnnnnnnnnnnnnnnnnnnnnnnnnnnnnnnnnnnnnnnnnnnnnnnnnnnnnnnnnnnnnnnnnnnnnnnnnnnnnnnnnnnnnnnnnnnnnnnnnnnnnnnnnnnnnnnnnnnnnnnnnnnnnnnnnnnnnnnnnnnnnnnnnnnnnnnnnnnnnnnnnnnnnnnnnnnnnnnnnnnnnnnnnnnnnnnnnnnnnnnnnnnnnnnnnnnnnnnnnnnnnnnnnnnnnnnnnnnnnnnnnnnnnnnnnnnnnnnnnnnnnnnnnnnnnnnnnnnnnnnnnnnnnnnnnnnnnnnnnnnnnnnnnnnnnnnnnnnnnnnnnnnnnnnnnnnnnnnnnnnnnnnnnnnnnnnnnnnnnnnnnnnnnnnnnnnnnnnnnnnnnnnnnnnnnnnnnnnnnnnnnnnnnnnnnnnnnnnnnnnnnnnnnnnnnnnnnnnnnnnnnnnnnnnnnnnnnnnnnnnnnnnnnnnnnnnnnnnnnnnnnnnnnnnnnnnnnnnnnnnnnnnnnnnnnnnnnnnnnnnnnnnnnnnnnnnnnnnnnnnnnnnnnnnnnnnnnnnnnnnnnnnnnnnnnnnnnnnnnnnnnnnnnnnnnnnnnnnnnnnnnnnnnnnnnnnnnnnnnnnnnnnnnnnnnnnnnnnnnnnnnnnnnnnnnnnnnnnnnnnnnnnnnnnnnnnnnnnnnnnnnnnnnnnnnnnnnnnnnnnnnnnnnnnnnnnnnnnnnnnnnnnnnnnnnnnnnnnnnnnnnnnnnnnnnnnnnnnnnnnnnnnnnnnnnnnnnnnnnnnnnnnnnnnnnnnnnnnnnnnnnnnnnnnnnnnnnnnnnnnnnnnnnnnnnnnnnnnnnnnnnnnnnnnnnnnnnnnnnnnnnnnnnnnnnnnnnnnnnnnnnnnnnnnnnnnnnnnnnnnnnnnnnnnnnnnnnnnnnnnnnnnnnnnnnnnnnnnnnnnnnnnnnnnnnnnnnnnnnnnnnnnnnnnnnnnnnnnnnnnnnnnnnnnnnnnnnnnnnnnnnnnnnnnnnnnnnnnnnnnnnnnnnnnnnnnnnnnnnnnnnnnnnnnnnnnnnnnnnnnnnnnnnnnnnnnnnnnnnnnnnnnnnnnnnnnnnnnnnnnnnnnnnnnnnnnnnnnnnnnnnnnnnnnnnnnnnnnnnnnnnnnnnnnnnnnnnnnnnnnnnnnnnnnnnnnnnnnnnnnnnnnnnnnnnnnnnnnnnnnnnnnnnnnnnnnnnnnnnnnnnnnnnnnnnnnnnnnnnnnnnnnnnnnnnnnnnnnnnnnnnnnnnnnnnnnnnnnnnnnnnnnnnnnnnnnnnnnnnnnnnnnnnnnnnnnnnnnnnnnnnnnnnnnnnnnnnnnnnnnnnnnnnnnnnnnnnnnnnnnnnnnnnnnnnnnnnnnnnnnnnnnnnnnnnnnnnnnnnnnnnnnnnnnnnnnnnnnnnnnnnnnnnnnnnnnnnnnnnnnnnnnnnnnnnnnnnnnnnnnnnnnnnnnnnnnnnnnnnnnnnnnnnnnnnnnnnnnnnnnnnnnnnnnnnnnnnnnnnnnnnnnnnnnnnnnnnnnnnnnnnnnnnnnnnnnnnnnnnnnnnnnnnnnnnnnnnnnnnnnnnnnnnnnnnnnnnnnnnnnnnnnnnnnnnnnnnnnnnnnnnnnnnnnnnnnnnnnnnnnnnnnnnnnnnnnnnnnnnnnnnnnnnnnnnnnnnnnnnnnnnnnnnnnnnnnnnnnnnnnnnnnnnnnnnnnnnnnnnnnnnnnnnnnnnnnnnnnnnnnnnnnnnnnnnnnnnnnnnnnnnnnnnnnnnnnnnnnnnnnnnnnnnnnnnnnnnnnnnnnnnnnnnnnnnnnnnnnnnnnnnnnnnnnnnnnnnnnnnnnnnnnnnnnnnnnnnnnnnnnnnnnnnnnnnnnnnnnnnnnnnnnnnnnnnnnnnnnnnnnnnnnnnnnnnnnnnnnnnnnnnnnnnnnnnnnnnnnnnnnnnnnnnnnnnnnnnnnnnnnnnnnnnnnnnnnnnnnnnnnnnnnnnnnnnnnnnnnnnnnnnnnnnnnnnnnnnnnnnnnnnnnnnnnnnnnnnnnnnnnnnnnnnnnnnnnnnnnnnnnnnnnnnnnnnnnnnnnnnnnnnnnnnnnnnnnnnnnnnnnnnnnnnnnnnnnnnnnnnnnnnnnnnnnnnnnnnnnnnnnnnnnnnnnnnnnnnnnnnnnnnnnnnnnnnnnnnnnnnnnnnnnnnnnnnnnnnnnnnnnnnnnnnnnnnnnnnnnnnnnnnnnnnnnnnnnnnnnnnnnnnnnnnnnnnnnnnnnnnnnnnnnnnnnnnnnnnnnnnnnnnnnnnnnnnnnnnnnnnnnnnnnnnnnnnnnnnnnnnnnnnnnnnnnnnnnnnnnnnnnnnnnnnnnnnnnnnnnnnnnnnnnnnnnnnnnnnnnnnnnnnnnnnnnnnnnnnnnnnnnnnnnnnnnnnnnnnnnnnnnnnnnnnnnnnnnnnnnnnnnnnnnnnnnnnnnnnnnnnnnnnnnnnnnnnnnnnnnnnnnnnnnnnnnnnnnnnnnnnnnnnnnnnnnnnnnnnnnnnnnnnnnnnnnnnnnnnnnnnnnnnnnnnnnnnnnnnnnnnnnnnnnnnnnnnnnnnnnnnnnnnnnnnnnnnnnnnnnnnnnnnnnnnnnnnnnnnnnnnnnnnnnnnnnnnnnnnnnnnnnnnnnnnnnnnnnnnnnnnnnnnnnnnnnnnnnnnnnnnnnnnnnnnnnnnnnnnnnnnnnnnnnnnnnnnnnnnnnnnnnnnnnnnnnnnnnnnnnnnnnnnnnnnnnnnnnnnnnnnnnnnnnnnnnnnnnnnnnnnnnnnnnnnnnnnnnnnnnnnnnnnnnnnnnnnnnnnnnnnnnnnnnnnnnnnnnnnnnnnnnnnnnnnnnnnnnnnnnnnnnnnnnnnnnnnnnnnnnnnnnnnnnnnnnnnnnnnnnnnnnnnnnnnnnnnnnnnnnnnnnnnnnnnnnnnnnnnnnnnnnnnnnnnnnnnnnnnnnnnnnnnnnnnnnnnnnnnnnnnnnnnnnnnnnnnnnnnnnnnnnnnnnnnnnnnnnnnnnnnnnnnnnnnnnnnnnnnnnnnnnnnnnnnnnnnnnnnnnnnnnnnnnnnnnnnnnnnnnnnnnnnnnnnnnnnnnnnnnnnnnnnnnnnnnnnnnnnnnnnnnnnnnnnnnnnnnnnnnnnnnnnnnnnnnnnnnnnnnnnnnnnnnnnnnnnnnnnnnnnnnnnnnnnnnnnnnnnnnnnnnnnnnnnnnnnnnnnnnnnnnnnnnnnnnnnnnnnnnnnnnnnnnnnnnnnnnnnnnnnnnnnnnnnnnnnnnnnnnnnnnnnnnnnnnnnnnnnnnnnnnnnnnnnnnnnnnnnnnnnnnnnnnnnnnnnnnnnnnnnnnnnnnnnnnnnnnnnnnnnnnnnnnnnnnnnnnnnnnnnnnnnnnnnnnnnnnnnnnnnnnnnnnnnnnnnnnnnnnnnnnnnnnnnnnnnnnnnnnnnnnnnnnnnnnnnnnnnnnnnnnnnnnnnnnnnnnnnnnnnnnnnnnnnnnnnnnnnnnnnnnnnnnnnnnnnnnnnnnnnnnnnnnnnnnnnnnnnnnnnnnnnnnnnnnnnnnnnnnnnnnnnnnnnnnnnnnnnnnnnnnnnnnnnnnnnnnnnnnnnnnnnnnnnnnnnnnnnnnnnnnnnnnnnnnnnnnnnnnnnnnnnnnnnnnnnnnnnnnnnnnnnnnnnnnnnnnnnnnnnnnnnnnnnnnnnnnnnnnnnnnnnnnnnnnnnnnnnnnnnnnnnnnnnnnnnnnnnnnnnnnnnnnnnnnnnnnnnnnnnnnnnnnnnnnnnnnnnnnnnnnnnnnnnnnnnnnnnnnnnnnnnnnnnnnnnnnnnnnnnnnnnnnnnnnnnnnnnnnnnnnnnnnnnnnnnnnnnnnnnnnnnnnnnnnnnnnnnnnnnnnnnnnnnnnnnnnnnnnnnnnnnnnnnnnnnnnnnnnnnnnnnnnnnnnnnnnnnnnnnnnnnnnnnnnnnnnnnnnnnnnnnnnnnnnnnnnnnnnnnnnnnnnnnnnnnnnnnnnnnnnnnnnnnnnnnnnnnnnnnnnnnnnnnnnnnnnnnnnnnnnnnnnnnnnnnnnnnnnnnnnnnnnnnnnnnnnnnnnnnnnnnnnnnnnnnnnnnnnnnnnnnnnnnnnnnnnnnnnnnnnnnnnnnnnnnnnnnnnnnnnnnnnnnnnnnnnnnnnnnnnnnnnnnnnnnnnnnnnnnnnnnnnnnnnnnnnnnnnnnnnnnnnnnnnnnnnnnnnnnnnnnnnnnnnnnnnnnnnnnnnnnnnnnnnnnnnnnnnnnnnnnnnnnnnnnnnnnnnnnnnnnnnnnnnnnnnnnnnnnnnnnnnnnnnnnnnnnnnnnnnnnnnnnnnnnnnnnnnnnnnnnnnnnnnnnnnnnnnnnnnnnnnnnnnnnnnnnnnnnnnnnnnnnnnnnnnnnnnnnnnnnnnnnnnnnnnnnnnnnnnnnnnnnnnnnnnnnnnnnnnnnnnnnnnnnnnnnnnnnnnnnnnnnnnnnnnnnnnnnnnnnnnnnnnnnnnnnnnnnnnnnnnnnnnnnnnnnnnnnnnnnnnnnnnnnnnnnnnnnnnnnnnnnnnnnnnnnnnnnnnnnnnnnnnnnnnnnnnnnnnnnnnnnnnnnnnnnnnnnnnnnnnnnnnnnnnnnnnnnnnnnnnnnnnnnnnnnnnnnnnnnnnnnnnnnnnnnnnnnnnnnnnnnnnnnnnnnnnnnnnnnnnnnnnnnnnnnnnnnnnnnnnnnnnnnnnnnnnnnnnnnnnnnnnnnnnnnnnnnnnnnnnnnnnnnnnnnnnnnnnnnnnnnnnnnnnnnnnnnnnnnnnnnnnnnnnnnnnnnnnnnnnnnnnnnnnnnnnnnnnnnnnnnnnnnnnnnnnnnnnnnnnnnnnnnnnnnnnnnnnnnnnnnnnnnnnnnnnnnnnnnnnnnnnnnnnnnnnnnnnnnnnnnnnnnnnnnnnnnnnnnnnnnnnnnnnnnnnnnnnnnnnnnnnnnnnnnnnnnnnnnnnnnnnnnnnnnnnnnnnnnnnnnnnnnnnnnnnnnnnnnnnnnnnnnnnnnnnnnnnnnnnnnnnnnnnnnnnnnnnnnnnnnnnnnnnnnnnnnnnnnnnnnnnnnnnnnnnnnnnnnnnnnnnnnnnnnnnnnnnnnnnnnnnnnnnnnnnnnnnnnnnnnnnnnnnnnnnnnnnnnnnnnnnnnnnnnnnnnnnnnnnnnnnnnnnnnnnnnnnnnnnnnnnnnnnnnnnnnnnnnnnnnnnnnnnnnnnnnnnnnnnnnnnnnnnnnnnnnnnnnnnnnnnnnnnnnnnnnnnnnnnnnnnnnnnnnnnnnnnnnnnnnnnnnnnnnnnnnnnnnnnnnnnnnnnnnnnnnnnnnnnnnnnnnnnnnnnnnnnnnnnnnnnnnnnnnnnnnnnnnnnnnnnnnnnnnnnnnnnnnnnnnnnnnnnnnnnnnnnnnnnnnnnnnnnnnnnnnnnnnnnnnnnnnnnnnnnnnnnnnnnnnnnnnnnnnnnnnnnnnnnnnnnnnnnnnnnnnnnnnnnnnnnnnnnnnnnnnnnnnnnnnnnnnnnnnnnnnnnnnnnnnnnnnnnnnnnnnnnnnnnnnnnnnnnnnnnnnnnnnnnnnnnnnnnnnnnnnnnnnnnnnnnnnnnnnnnnnnnnnnnnnnnnnnnnnnnnnnnnnnnnnnnnnnnnnnnnnnnnnnnnnnnnnnnnnnnnnnnnnnnnnnnnnnnnnnnnnnnnnnnnnnnnnnnnnnnnnnnnnnnnnnnnnnnnnnnnnnnnnnnnnnnnnnnnnnnnnnnnnnnnnnnnnnnnnnnnnnnnnnnnnnnnnnnnnnnnnnnnnnnnnnnnnnnnnnnnnnnnnnnnnnnnnnnnnnnnnnnnnnnnnnnnnnnnnnnnnnnnnnnnnnnnnnnnnnnnnnnnnnnnnnnnnnnnnnnnnnnnnnnnnnnnnnnnnnnnnnnnnnnnnnnnnnnnnnnnnnnnnnnnnnnnnnnnnnnnnnnnnnnnnnnnnnnnnnnnnnnnnnnnnnnnnnnnnnnnnnnnnnnnnnnnnnnnnnnnnnnnnnnnnnnnnnnnnnnnnnnnnnnnnnnnnnnnnnnnnnnnnnnnnnnnnnnnnnnnnnnnnnnnnnnnnnnnnnnnnnnnnnnnnnnnnnnnnnnnnnnnnnnnnnnnnnnnnnnnnnnnnnnnnnnnnnnnnnnnnnnnnnnnnnnnnnnnnnnnnnnnnnnnnnnnnnnnnnnnnnnnnnnnnnnnnnnnnnnnnnnnnnnnnnnnnnnnnnnnnnnnnnnnnnnnnnnnnnnnnnnnnnnnnnnnnnnnnnnnnnnnnnnnnnnnnnnnnnnnnnnnnnnnnnnnnnnnnnnnnnnnnnnnnnnnnnnnnnnnnnnnnnnnnnnnnnnnnnnnnnnnnnnnnnnnnnnnnnnnnnnnnnnnnnnnnnnnnnnnnnnnnnnnnnnnnnnnnnnnnnnnnnnnnnnnnnnnnnnnnnnnnnnnnnnnnnnnnnnnnnnnnnnnnnnnnnnnnnnnnnnnnnnnnnnnnnnnnnnnnnnnnnnnnnnnnnnnnnnnnnnnnnnnnnnnnnnnnnnnnnnnnnnnnnnnnnnnnnnnnnnnnnnnnnnnnnnnnnnnnnnnnnnnnnnnnnnnnnnnnnnnnnnnnnnnnnnnnnnnnnnnnnnnnnnnnnnnnnnnnnnnnnnnnnnnnnnnnnnnnnnnnnnnnnnnnnnnnnnnnnnnnnnnnnnnnnnnnnnnnnnnnnnnnnnnnnnnnnnnnnnnnnnnnnnnnnnnnnnnnnnnnnnnnnnnnnnnnnnnnnnnnnnnnnnnnnnnnnnnnnnnnnnnnnnnnnnnnnnnnnnnnnnnnnnnnnnnnnnnnnnnnnnnnnnnnnnnnnnnnnnnnnnnnnnnnnnnnnnnnnnnnnnnnnnnnnnnnnnnnnnnnnnnnnnnnnnnnnnnnnnnnnnnnnnnnnnnnnnnnnnnnnnnnnnnnnnnnnnnnnnnnnnnnnnnnnnnnnnnnnnnnnnnnnnnnnnnnnnnnnnnnnnnnnnnnnnnnnnnnnnnnnnnnnnnnnnnnnnnnnnnnnnnnnnnnnnnnnnnnnnnnnnnnnnnnnnnnnnnnnnnnnnnnnnnnnnnnnnnnnnnnnnnnnnnnnnnnnnnnnnnnnnnnnnnnnnnnnnnnnnnnnnnnnnnnnnnnnnnnnnnnnnnnnnnnnnnnnnnnnnnnnnnnnnnnnnnnnnnnnnnnnnnnnnnnnnnnnnnnnnnnnnnnnnnnnnnnnnnnnnnnnnnnnnnnnnnnnnnnnnnnnnnnnnnnnnnnnnnnnnnnnnnnnnnnnnnnnnnnnnnnnnnnnnnnnnnnnnnnnnnnnnnnnnnnnnnnnnnnnnnnnnnnnnnnnnnnnnnnnnnnnnnnnnnnnnnnnnnnnnnnnnnnnnnnnnnnnnnnnnnnnnnnnnnnnnnnnnnnnnnnnnnnnnnnnnnnnnnnnnnnnnnnnnnnnnnnnnnnnnnnnnnnnnnnnnnnnnnnnnnnnnnnnnnnnnnnnnnnnnnnnnnnnnnnnnnnnnnnnnnnnnnnnnnnnnnnnnnnnnnnnnnnnnnnnnnnnnnnnnnnnnnnnnnnnnnnnnnnnnnnnnnnnnnnnnnnnnnnnnnnnnnnnnnnnnnnnnnnnnnnnnnnnnnnnnnnnnnnnnnnnnnnnnnnnnnnnnnnnnnnnnnnnnnnnnnnnnnnnnnnnnnnnnnnnnnnnnnnnnnnnnnnnnnnnnnnnnnnnnnnnnnnnnnnnnnnnnnnnnnnnnnnnnnnnnnnnnnnnnnnnnnnnnnnnnnnnnnnnnnnnnnnnnnnnnnnnnnnnnnnnnnnnnnnnnnnnnnnnnnnnnnnnnnnnnnnnnnnnnnnnnnnnnnnnnnnnnnnnnnnnnnnnnnnnnnnnnnnnnnnnnnnnnnnnnnnnnnnnnnnnnnnnnnnnnnnnnnnnnnnnnnnnnnnnnnnnnnnnnnnnnnnnnnnnnnnnnnnnnnnnnnnnnnnnnnnnnnnnnnnnnnnnnnnnnnnnnnnnnnnnnnnnnnnnnnnnnnnnnnnnnnnnnnnnnnnnnnnnnnnnnnnnnnnnnnnnnnnnnnnnnnnnnnnnnnnnnnnnnnnnnnnnnnnnnnnnnnnnnnnnnnnnnnnnnnnnnnnnnnnnnnnnnnnnnnnnnnnnnnnnnnnnnnnnnnnnnnnnnnnnnnnnnnnnnnnnnnnnnnnnnnnnnnnnnnnnnnnnnnnnnnnnnnnnnnnnnnnnnnnnnnnnnnnnnnnnnnnnnnnnnnnnnnnnnnnnnnnnnnnnnnnnnnnnnnnnnnnnnnnnnnnnnnnnnnnnnnnnnnnnnnnnnnnnnnnnnnnnnnnnnnnnnnnnnnnnnnnnnnnnnnnnnnnnnnnnnnnnnnnnnnnnnnnnnnnnnnnnnnnnnnnnnnnnnnnnnnnnnnnnnnnnnnnnnnnnnnnnnnnnnnnnnnnnnnnnnnnnnnnnnnnnnnnnnnnnnnnnnnnnnnnnnnnnnnnnnnnnnnnnnnnnnnnnnnnnnnnnnnnnnnnnnnnnnnnnnnnnnnnnnnnnnnnnnnnnnnnnnnnnnnnnnnnnnnnnnnnnnnnnnnnnnnnnnnnnnnnnnnnnnnnnnnnnnnnnnnnnnnnnnnnnnnnnnnnnnnnnnnnnnnnnnnnnnnnnnnnnnnnnnnnnnnnnnnnnnnnnnnnnnnnnnnnnnnnnnnnnnnnnnnnnnnnnnnnnnnnnnnnnnnnnnnnnnnnnnnnnnnnnnnnnnnnnnnnnnnnnnnnnnnnnnnnnnnnnnnnnnnnnnnnnnnnnnnnnnnnnnnnnnnnnnnnnnnnnnnnnnnnnnnnnnnnnnnnnnnnnnnnnnnnnnnnnnnnnnnnnnnnnnnnnnnnnnnnnnnnnnnnnnnnnnnnnnnnnnnnnnnnnnnnnnnnnnnnnnnnnnnnnnnnnnnnnnnnnnnnnnnnnnnnnnnnnnnnnnnnnnnnnnnnnnnnnnnnnnnnnnnnnnnnnnnnnnnnnnnnnnnnnnnnnnnnnnnnnnnnnnnnnnnnnnnnnnnnnnnnnnnnnnnnnnnnnnnnnnnnnnnnnnnnnnnnnnnnnnnnnnnnnnnnnnnnnnnnnnnnnnnnnnnnnnnnnnnnnnnnnnnnnnnnnnnnnnnnnnnnnnnnnnnnnnnnnnnnnnnnnnnnnnnnnnnnnnnnnnnnnnnnnnnnnnnnnnnnnnnnnnnnnnnnnnnnnnnnnnnnnnnnnnnnnnnnnnnnnnnnnnnnnnnnnnnnnnnnnnnnnnnnnnnnnnnnnnnnnnnnnnnnnnnnnnnnnnnnnnnnnnnnnnnnnnnnnnnnnnnnnnnnnnnnnnnnnnnnnnnnnnnnnnnnnnnnnnnnnnnnnnnnnnnnnnnnnnnnnnnnnnnnnnnnnnnnnnnnnnnnnnnnnnnnnnnnnnnnnnnnnnnnnnnnnnnnnnnnnnnnnnnnnnnnnnnnnnnnnnnnnnnnnnnnnnnnnnnnnnnnnnnnnnnnnnnnnnnnnnnnnnnnnnnnnnnnnnnnnnnnnnnnnnnnnnnnnnnnnnnnnnnnnnnnnnnnnnnnnnnnnnnnnnnnnnnnnnnnnnnnnnnnnnnnnnnnnnnnnnnnnnnnnnnnnnnnnnnnnnnnnnnnnnnnnnnnnnnnnnnnnnnnnnnnnnnnnnnnnnnnnnnnnnnnnnnnnnnnnnnnnnnnnnnnnnnnnnnnnnnnnnnnnnnnnnnnnnnnnnnnnnnnnnnnnnnnnnnnnnnnnnnnnnnnnnnnnnnnnnnnnnnnnnnnnnnnnnnnnnnnnnnnnnnnnnnnnnnnnnnnnnnnnnnnnnnnnnnnnnnnnnnnnnnnnnnnnnnnnnnnnnnnnnnnnnnnnnnnnnnnnnnnnnnnnnnnnnnnnnnnnnnnnnnnnnnnnnnnnnnnnnnnnnnnnnnnnnnnnnnnnnnnnnnnnnnnnnnnnnnnnnnnnnnnnnnnnnnnnnnnnnnnnnnnnnnnnnnnnnnnnnnnnnnnnnnnnnnnnnnnnnnnnnnnnnnnnnnnnnnnnnnnnnnnnnnnnnnnnnnnnnnnnnnnnnnnnnnnnnnnnnnnnnnnnnnnnnnnnnnnnnnnnnnnnnnnnnnnnnnnnnnnnnnnnnnnnnnnnnnnnnnnnnnnnnnnnnnnnnnnnnnnnnnnnnnnnnnnnnnnnnnnnnnnnnnnnnnnnnnnnnnnnnnnnnnnnnnnnnnnnnnnnnnnnnnnnnnnnnnnnnnnnnnnnnnnnnnnnnnnnnnnnnnnnnnnnnnnnnnnnnnnnnnnnnnnnnnnnnnnnnnnnnnnnnnnnnnnnnnnnnnnnnnnnnnnnnnnnnnnnnnnnnnnnnnnnnnnnnnnnnnnnnnnnnnnnnnnnnnnnnnnnnnnnnnnnnnnnnnnnnnnnnnnnnnnnnnnnnnnnnnnnnnnnnnnnnnnnnnnnnnnnnnnnnnnnnnnnnnnnnnnnnnnnnnnnnnnnnnnnnnnnnnnnnnnnnnnnnnnnnnnnnnnnnnnnnnnnnnnnnnnnnnnnnnnnnnnnnnnnnnnnnnnnnnnnnnnnnnnnnnnnnnnnnnnnnnnnnnnnnnnnnnnnnnnnnnnnnnnnnnnnnnnnnnnnnnnnnnnnnnnnnnnnnnnnnnnnnnnnnnnnnnnnnnnnnnnnnnnnnnnnnnnnnnnnnnnnnnnnnnnnnnnnnnnnnnnnnnnnnnnnnnnnnnnnnnnnnnnnnnnnnnnnnnnnnnnnnnnnnnnnnnnnnnnnnnnnnnnnnnnnnnnnnnnnnnnnnnnnnnnnnnnnnnnnnnnnnnnnnnnnnnnnnnnnnnnnnnnnnnnnnnnnnnnnnnnnnnnnnnnnnnnnnnnnnnnnnnnnnnnnnnnnnnnnnnnnnnnnnnnnnnnnnnnnnnnnnnnnnnnnnnnnnnnnnnnnnnnnnnnnnnnnnnnnnnnnnnnnnnnnnnnnnnnnnnnnnnnnnnnnnnnnnnnnnnnnnnnnnnnnnnnnnnnnnnnnnnnnnnnnnnnnnnnnnnnnnnnnnnnnnnnnnnnnnnnnnnnnnnnnnnnnnnnnnnnnnnnnnnnnnnnnnnnnnnnnnnnnnnnnnnnnnnnnnnnnnnnnnnnnnnnnnnnnnnnnnnnnnnnnnnnnnnnnnnnnnnnnnnnnnnnnnnnnnnnnnnnnnnnnnnnnnnnnnnnnnnnnnnnnnnnnnnnnnnnnnnnnnnnnnnnnnnnnnnnnnnnnnnnnnnnnnnnnnnnnnnnnnnnnnnnnnnnnnnnnnnnnnnnnnnnnnnnnnnnnnnnnnnnnnnnnnnnnnnnnnnnnnnnnnnnnnnnnnnnnnnnnnnnnnnnnnnnnnnnnnnnnnnnnnnnnnnnnnnnnnnnnnnnnnnnnnnnnnnnnnnnnnnnnnnnnnnnnnnnnnnnnnnnnnnnnnnnnnnnnnnnnnnnnnnnnnnnnnnnnnnnnnnnnnnnnnnnnnnnnnnnnnnnnnnnnnnnnnnnnnnnnnnnnnnnnnnnnnnnnnnnnnnnnnnnnnnnnnnnnnnnnnnnnnnnnnnnnnnnnnnnnnnnnnnnnnnnnnnnnnnnnnnnnnnnnnnnnnnnnnnnnnnnnnnnnnnnnnnnnnnnnnnnnnnnnnnnnnnnnnnnnnnnnnnnnnnnnnnnnnnnnnnnnnnnnnnnnnnnnnnnnnnnnnnnnnnnnnnnnnnnnnnnnnnnnnnnnnnnnnnnnnnnnnnnnnnnnnnnnnnnnnnnnnnnnnnnnnnnnnnnnnnnnnnnnnnnnnnnnnnnnnnnnnnnnnnnnnnnnnnnnnnnnnnnnnnnnnnnnnnnnnnnnnnnnnnnnnnnnnnnnnnnnnnnnnnnnnnnnnnnnnnnnnnnnnnnnnnnnnnnnnnnnnnnnnnnnnnnnnnnnnnnnnnnnnnnnnnnnnnnnnnnnnnnnnnnnnnnnnnnnnnnnnnnnnnnnnnnnnnnnnnnnnnnnnnnnnnnnnnnnnnnnnnnnnnnnnnnnnnnnnnnnnnnnnnnnnnnnnnnnnnnnnnnnnnnnnnnnnnnnnnnnnnnnnnnnnnnnnnnnnnnnnnnnnnnnnnnnnnnnnnnnnnnnnnnnnnnnnnnnnnnnnnnnnnnnnnnnnnnnnnnnnnnnnnnnnnnnnnnnnnnnnnnnnnnnnnnnnnnnnnnnnnnnnnnnnnnnnnnnnnnnnnnnnnnnnnnnnnnnnnnnnnnnnnnnnnnnnnnnnnnnnnnnnnnnnnnnnnnnnnnnnnnnnnnnnnnnnnnnnnnnnnnnnnnnnnnnnnnnnnnnnnnnnnnnnnnnnnnnnnnnnnnnnnnnnnnnnnnnnnnnnnnnnnnnnnnnnnnnnnnnnnnnnnnnnnnnnnnnnnnnnnnnnnnnnnnnnnnnnnnnnnnnnnnnnnnnnnnnnnnnnnnnnnnnnnnnnnnnnnnnnnnnnnnnnnnnnnnnnnnnnnnnnnnnnnnnnnnnnnnnnnnnnnnnnnnnnnnnnnnnnnnnnnnnnnnnnnnnnnnnnnnnnnnnnnnnnnnnnnnnnnnnnnnnnnnnnnnnnnnnnnnnnnnnnnnnnnnnnnnnnnnnnnnnnnnnnnnnnnnnnnnnnnnnnnnnnnnnnnnnnnnnnnnnnnnnnnnnnnnnnnnnnnnnnnnnnnnnnnnnnnnnnnnnnnnnnnnnnnnnnnnnnnnnnnnnnnnnnnnnnnnnnnnnnnnnnnnnnnnnnnnnnnnnnnnnnnnnnnnnnnnnnnnnnnnnnnnnnnnnnnnnnnnnnnnnnnnnnnnnnnnnnnnnnnnnnnnnnnnnnnnnnnnnnnnnnnnnnnnnnnnnnnnnnnnnnnnnnnnnnnnnnnnnnnnnnnnnnnnnnnnnnnnnnnnnnnnnnnnnnnnnnnnnnnnnnnnnnnnnnnnnnnnnnnnnnnnnnnnnnnnnnnnnnnnnnnnnnnnnnnnnnnnnnnnnnnnnnnnnnnnnnnnnnnnnnnnnnnnnnnnnnnnnnnnnnnnnnnnnnnnnnnnnnnnnnnnnnnnnnnnnnnnnnnnnnnnnnnnnnnnnnnnnnnnnnnnnnnnnnnnnnnnnnnnnnnnnnnnnnnnnnnnnnnnnnnnnnnnnnnnnnnnnnnnnnnnnnnnnnnnnnnnnnnnnnnnnnnnnnnnnnnnnnnnnnnnnnnnnnnnnnnnnnnnnnnnnnnnnnnnnnnnnnnnnnnnnnnnnnnnnnnnnnnnnnnnnnnnnnnnnnnnnnnnnnnnnnnnnnnnnnnnnnnnnnnnnnnnnnnnnnnnnnnnnnnnnnnnnnnnnnnnnnnnnnnnnnnnnnnnnnnnnnnnnnnnnnnnnnnnnnnnnnnnnnnnnnnnnnnnnnnnnnnnnnnnnnnnnnnnnnnnnnnnnnnnnnnnnnnnnnnnnnnnnnnnnnnnnnnnnnnnnnnnnnnnnnnnnnnnnnnnnnnnnnnnnnnnnnnnnnnnnnnnnnnnnnnnnnnnnnnnnnnnnnnnnnnnnnnnnnnnnnnnnnnnnnnnnnnnnnnnnnnnnnnnnnnnnnnnnnnnnnnnnnnnnnnnnnnnnnnnnnnnnnnnnnnnnnnnnnnnnnnnnnnnnnnnnnnnnnnnnnnnnnnnnnnnnnnnnnnnnnnnnnnnnnnnnnnnnnnnnnnnnnnnnnnnnnnnnnnnnnnnnnnnnnnnnnnnnnnnnnnnnnnnnnnnnnnnnnnnnnnnnnnnnnnnnnnnnnnnnnnnnnnnnnnnnnnnnnnnnnnnnnnnnnnnnnnnnnnnnnnnnnnnnnnnnnnnnnnnnnnnnnnnnnnnnnnnnnnnnnnnnnnnnnnnnnnnnnnnnnnnnnnnnnnnnnnnnnnnnnnnnnnnnnnnnnnnnnnnnnnnnnnnnnnnnnnnnnnnnnnnnnnnnnnnnnnnnnnnnnnnnnnnnnnnnnnnnnnnnnnnnnnnnnnnnnnnnnnnnnnnnnnnnnnnnnnnnnnnnnnnnnnnnnnnnnnnnnnnnnnnnnnnnnnnnnnnnnnnnnnnnnnnnnnnnnnnnnnnnnnnnnnnnnnnnnnnnnnnnnnnnnnnnnnnnnnnnnnnnnnnnnnnnnnnnnnnnnnnnnnnnnnnnnnnnnnnnnnnnnnnnnnnnnnnnnnnnnnnnnnnnnnnnnnnnnnnnnnnnnnnnnnnnnnnnnnnnnnnnnnnnnnnnnnnnnnnnnnnnnnnnnnnnnnnnnnnnnnnnnnnnnnnnnnnnnnnnnnnnnnnnnnnnnnnnnnnnnnnnnnnnnnnnnnnnnnnnnnnnnnnnnnnnnnnnnnnnnnnnnnnnnnnnnnnnnnnnnnnnnnnnnnnnnnnnnnnnnnnnnnnnnnnnnnnnnnnnnnnnnnnnnnnnnnnnnnnnnnnnnnnnnnnnnnnnnnnnnnnnnnnnnnnnnnnnnnnnnnnnnnnnnnnnnnnnnnnnnnnnnnnnnnnnnnnnnnnnnnnnnnnnnnnnnnnnnnnnnnnnnnnnnnnnnnnnnnnnnnnnnnnnnnnnnnnnnnnnnnnnnnnnnnnnnnnnnnnnnnnnnnnnnnnnnnnnnnnnnnnnnnnnnnnnnnnnnnnnnnnnnnnnnnnnnnnnnnnnnnnnnnnnnnnnnnnnnnnnnnnnnnnnnnnnnnnnnnnnnnnnnnnnnnnnnnnnnnnnnnnnnnnnnnnnnnnnnnnnnnnnnnnnnnnnnnnnnnnnnnnnnnnnnnnnnnnnnnnnnnnnnnnnnnnnnnnnnnnnnnnnnnnnnnnnnnnnnnnnnnnnnnnnnnnnnnnnnnnnnnnnnnnnnnnnnnnnnnnnnnnnnnnnnnnnnnnnnnnnnnnnnnnnnnnnnnnnnnnnnnnnnnnnnnnnnnnnnnnnnnnnnnnnnnnnnnnnnnnnnnnnnnnnnnnnnnnnnnnnnnnnnnnnnnnnnnnnnnnnnnnnnnnnnnnnnnnnnnnnnnnnnnnnnnnnnnnnnnnnnnnnnnnnnnnnnnnnnnnnnnnnnnnnnnnnnnnnnnnnnnnnnnnnnnnnnnnnnnnnnnnnnnnnnnnnnnnnnnnnnnnnnnnnnnnnnnnnnnnnnnnnnnnnnnnnnnnnnnnnnnnnnnnnnnnnnnnnnnnnnnnnnnnnnnnnnnnnnnnnnnnnnnnnnnnnnnnnnnnnnnnnnnnnnnnnnnnnnnnnnnnnnnnnnnnnnnnnnnnnnnnnnnnnnnnnnnnnnnnnnnnnnnnnnnnnnnnnnnnnnnnnnnnnnnnnnnnnnnnnnnnnnnnnnnnnnnnnnnnnnnnnnnnnnnnnnnnnnnnnnnnnnnnnnnnnnnnnnnnnnnnnnnnnnnnnnnnnnnnnnnnnnnnnnnnnnnnnnnnnnnnnnnnnnnnnnnnnnnnnnnnnnnnnnnnnnnnnnnnnnnnnnnnnnnnnnnnnnnnnnnnnnnnnnnnnnnnnnnnnnnnnnnnnnnnnnnnnnnnnnnnnnnnnnnnnnnnnnnnnnnnnnnnnnnnnnnnnnnnnnnnnnnnnnnnnnnnnnnnnnnnnnnnnnnnnnnnnnnnnnnnnnnnnnnnnnnnnnnnnnnnnnnnnnnnnnnnnnnnnnnnnnnnnnnnnnnnnnnnnnnnnnnnnnnnnnnnnnnnnnnnnnnnnnnnnnnnnnnnnnnnnnnnnnnnnnnnnnnnnnnnnnnnnnnnnnnnnnnnnnnnnnnnnnnnnnnnnnnnnnnnnnnnnnnnnnnnnnnnnnnnnnnnnnnnnnnnnnnnnnnnnnnnnnnnnnnnnnnnnnnnnnnnnnnnnnnnnnnnnnnnnnnnnnnnnnnnnnnnnnnnnnnnnnnnnnnnnnnnnnnnnnnnnnnnnnnnnnnnnnnnnnnnnnnnnnnnnnnnnnnnnnnnnnnnnnnnnnnnnnnnnnnnnnnnnnnnnnnnnnnnnnnnnnnnnnnnnnnnnnnnnnnnnnnnnnnnnnnnnnnnnnnnnnnnnnnnnnnnnnnnnnnnnnnnnnnnnnnnnnnnnnnnnnnnnnnnnnnnnnnnnnnnnnnnnnnnnnnnnnnnnnnnnnnnnnnnnnnnnnnnnnnnnnnnnnnnnnnnnnnnnnnnnnnnnnnnnnnnnnnnnnnnnnnnnnnnnnnnnnnnnnnnnnnnnnnnnnnnnnnnnnnnnnnnnnnnnnnnnnnnnnnnnnnnnnnnnnnnnnnnnnnnnnnnnnnnnnnnnnnnnnnnnnnnnnnnnnnnnnnnnnnnnnnnnnnnnnnnnnnnnnnnnnnnnnnnnnnnnnnnnnnnnnnnnnnnnnnnnnnnnnnnnnnnnnnnnnnnnnnnnnnnnnnnnnnnnnnnnnnnnnnnnnnnnnnnnnnnnnnnnnnnnnnnnnnnnnnnnnnnnnnnnnnnnnnnnnnnnnnnnnnnnnnnnnnnnnnnnnnnnnnnnnnnnnnnnnnnnnnnnnnnnnnnnnnnnnnnnnnnnnnnnnnnnnnnnnnnnnnnnnnnnnnnnnnnnnnnnnnnnnnnnnnnnnnnnnnnnnnnnnnnnnnnnnnnnnnnnnnnnnnnnnnnnnnnnnnnnnnnnnnnnnnnnnnnnnnnnnnnnnnnnnnnnnnnnnnnnnnnnnnnnnnnnnnnnnnnnnnnnnnnnnnnnnnnnnnnnnnnnnnnnnnnnnnnnnnnnnnnnnnnnnnnnnnnnnnnnnnnnnnnnnnnnnnnnnnnnnnnnnnnnnnnnnnnnnnnnnnnnnnnnnnnnnnnnnnnnnnnnnnnnnnnnnnnnnnnnnnnnnnnnnnnnnnnnnnnnnnnnnnnnnnnnnnnnnnnnnnnnnnnnnnnnnnnnnnnnnnnnnnnnnnnnnnnnnnnnnnnnnnnnnnnnnnnnnnnnnnnnnnnnnnnnnnnnnnnnnnnnnnnnnnnnnnnnnnnnnnnnnnnnnnnnnnnnnnnnnnnnnnnnnnnnnnnnnnnnnnnnnnnnnnnnnnnnnnnnnnnnnnnnnnnnnnnnnnnnnnnnnnnnnnnnnnnnnnnnnnnnnnnnnnnnnnnnnnnnnnnnnnnnnnnnnnnnnnnnnnnnnnnnnnnnnnnnnnnnnnnnnnnnnnnnnnnnnnnnnnnnnnnnnnnnnnnnnnnnnnnnnnnnnnnnnnnnnnnnnnnnnnnnnnnnnnnnnnnnnnnnnnnnnnnnnnnnnnnnnnnnnnnnnnnnnnnnnnnnnnnnnnnnnnnnnnnnnnnnnnnnnnnnnnnnnnnnnnnnnnnnnnnnnnnnnnnnnnnnnnnnnnnnnnnnnnnnnnnnnnnnnnnnnnnnnnnnnnnnnnnnnnnnnnnnnnnnnnnnnnnnnnnnnnnnnnnnnnnnnnnnnnnnnnnnnnnnnnnnnnnnnnnnnnnnnnnnnnnnnnnnnnnnnnnnnnnnnnnnnnnnnnnnnnnnnnnnnnnnnnnnnnnnnnnnnnnnnnnnnnnnnnnnnnnnnnnnnnnnnnnnnnnnnnnnnnnnnnnnnnnnnnnnnnnnnnnnnnnnnnnnnnnnnnnnnnnnnnnnnnnnnnnnnnnnnnnnnnnnnnnnnnnnnnnnnnnnnnnnnnnnnnnnnnnnnnnnnnnnnnnnnnnnnnnnnnnnnnnnnnnnnnnnnnnnnnnnnnnnnnnnnnnnnnnnnnnnnnnnnnnnnnnnnnnnnnnnnnnnnnnnnnnnnnnnnnnnnnnnnnnnnnnnnnnnnnnnnnnnnnnnnnnnnnnnnnnnnnnnnnnnnnnnnnnnnnnnnnnnnnnnnnnnnnnnnnnnnnnnnnnnnnnnnnnnnnnnnnnnnnnnnnnnnnnnnnnnnnnnnnnnnnnnnnnnnnnnnnnnnnnnnnnnnnnnnnnnnnnnnnnnnnnnnnnnnnnnnnnnnnnnnnnnnnnnnnnnnnnnnnnnnnnnnnnnnnnnnnnnnnnnnnnnnnnnnnnnnnnnnnnnnnnnnnnnnnnnnnnnnnnnnnnnnnnnnnnnnnnnnnnnnnnnnnnnnnnnnnnnnnnnnnnnnnnnnnnnnnnnnnnnnnnnnnnnnnnnnnnnnnnnnnnnnnnnnnnnnnnnnnnnnnnnnnnnnnnnnnnnnnnnnnnnnnnnnnnnnnnnnnnnnnnnnnnnnnnnnnnnnnnnnnnnnnnnnnnnnnnnnnnnnnnnnnnnnnnnnnnnnnnnnnnnnnnnnnnnnnnnnnnnnnnnnnnnnnnnnnnnnnnnnnnnnnnnnnnnnnnnnnnnnnnnnnnnnnnnnnnnnnnnnnnnnnnnnnnnnnnnnnnnnnnnnnnnnnnnnnnnnnnnnnnnnnnnnnnnnnnnnnnnnnnnnnnnnnnnnnnnnnnnnnnnnnnnnnnnnnnnnnnnnnnnnnnnnnnnnnnnnnnnnnnnnnnnnnnnnnnnnnnnnnnnnnnnnnnnnnnnnnnnnnnnnnnnnnnnnnnnnnnnnnnnnnnnnnnnnnnnnnnnnnnnnnnnnnnnnnnnnnnnnnnnnnnnnnnnnnnnnnnnnnnnnnnnnnnnnnnnnnnnnnnnnnnnnnnnnnnnnnnnnnnnnnnnnnnnnnnnnnnnnnnnnnnnnnnnnnnnnnnnnnnnnnnnnnnnnnnnnnnnnnnnnnnnnnnnnnnnnnnnnnnnnnnnnnnnnnnnnnnnnnnnnnnnnnnnnnnnnnnnnnnnnnnnnnnnnnnnnnnnnnnnnnnnnnnnnnnnnnnnnnnnnnnnnnnnnnnnnnnnnnnnnnnnnnnnnnnnnnnnnnnnnnnnnnnnnnnnnnnnnnnnnnnnnnnnnnnnnnnnnnnnnnnnnnnnnnnnnnnnnnnnnnnnnnnnnnnnnnnnnnnnnnnnnnnnnnnnnnnnnnnnnnnnnnnnnnnnnnnnnnnnnnnnnnnnnnnnnnnnnnnnnnnnnnnnnnnnnnnnnnnnnnnnnnnnnnnnnnnnnnnnnnnnnnnnnnnnnnnnnnnnnnnnnnnnnnnnnnnnnnnnnnnnnnnnnnnnnnnnnnnnnnnnnnnnnnnnnnnnnnnnnnnnnnnnnnnnnnnnnnnnnnnnnnnnnnnnnnnnnnnnnnnnnnnnnnnnnnnnnnnnnnnnnnnnnnnnnnnnnnnnnnnnnnnnnnnnnnnnnnnnnnnnnnnnnnnnnnnnnnnnnnnnnnnnnnnnnnnnnnnnnnnnnnnnnnnnnnnnnnnnnnnnnnnnnnnnnnnnnnnnnnnnnnnnnnnnnnnnnnnnnnnnnnnnnnnnnnnnnnnnnnnnnnnnnnnnnnnnnnnnnnnnnnnnnnnnnnnnnnnnnnnnnnnnnnnnnnnnnnnnnnnnnnnnnnnnnnnnnnnnnnnnnnnnnnnnnnnnnnnnnnnnnnnnnnnnnnnnnnnnnnnnnnnnnnnnnnnnnnnnnnnnnnnnnnnnnnnnnnnnnnnnnnnnnnnnnnnnnnnnnnnnnnnnnnnnnnnnnnnnnnnnnnnnnnnnnnnnnnnnnnnnnnnnnnnnnnnnnnnnnnnnnnnnnnnnnnnnnnnnnnnnnnnnnnnnnnnnnnnnnnnnnnnnnnnnnnnnnnnnnnnnnnnnnnnnnnnnnnnnnnnnnnnnnnnnnnnnnnnnnnnnnnnnnnnnnnnnnnnnnnnnnnnnnnnnnnnnnnnnnnnnnnnnnnnnnnnnnnnnnnnnnnnnnnnnnnnnnnnnnnnnnnnnnnnnnnnnnnnnnnnnnnnnnnnnnnnnnnnnnnnnnnnnnnnnnnnnnnnnnnnnnnnnnnnnnnnnnnnnnnnnnnnnnnnnnnnnnnnnnnnnnnnnnnnnnnnnnnnnnnnnnnnnnnnnnnnnnnnnnnnnnnnnnnnnnnnnnnnnnnnnnnnnnnnnnnnnnnnnnnnnnnnnnnnnnnnnnnnnnnnnnnnnnnnnnnnnnnnnnnnnnnnnnnnnnnnnnnnnnnnnnnnnnnnnnnnnnnnnnnnnnnnnnnnnnnnnnnnnnnnnnnnnnnnnnnnnnnnnnnnnnnnnnnnnnnnnnnnnnnnnnnnnnnnnnnnnnnnnnnnnnnnnnnnnnnnnnnnnnnnnnnnnnnnnnnnnnnnnnnnnnnnnnnnnnnnnnnnnnnnnnnnnnnnnnnnnnnnnnnnnnnnnnnnnnnnnnnnnnnnnnnnnnnnnnnnnnnnnnnnnnnnnnnnnnnnnnnnnnnnnnnnnnnnnnnnnnnnnnnnnnnnnnnnnnnnnnnnnnnnnnnnnnnnnnnnnnnnnnnnnnnnnnnnnnnnnnnnnnnnnnnnnnnnnnnnnnnnnnnnnnnnnnnnnnnnnnnnnnnnnnnnnnnnnnnnnnnnnnnnnnnnnnnnnnnnnnnnnnnnnnnnnnnnnnnnnnnnnnnnnnnnnnnnnnnnnnnnnnnnnnnnnnnnnnnnnnnnnnnnnnnnnnnnnnnnnnnnnnnnnnnnnnnnnnnnnnnnnnnnnnnnnnnnnnnnnnnnnnnnnnnnnnnnnnnnnnnnnnnnnnnnnnnnnnnnnnnnnnnnnnnnnnnnnnnnnnnnnnnnnnnnnnnnnnnnnnnnnnnnnnnnnnnnnnnnnnnnnnnnnnnnnnnnnnnnnnnnnnnnnnnnnnnnnnnnnnnnnnnnnnnnnnnnnnnnnnnnnnnnnnnnnnnnnnnnnnnnnnnnnnnnnnnnnnnnnnnnnnnnnnnnnnnnnnnnnnnnnnnnnnnnnnnnnnnnnnnnnnnnnnnnnnnnnnnnnnnnnnnnnnnnnnnnnnnnnnnnnnnnnnnnnnnnnnnnnnnnnnnnnnnnnnnnnnnnnnnnnnnnnnnnnnnnnnnnnnnnnnnnnnnnnnnnnnnnnnnnnnnnnnnnnnnnnnnnnnnnnnnnnnnnnnnnnnnnnnnnnnnnnnnnnnnnnnnnnnnnnnnnnnnnnnnnnnnnnnnnnnnnnnnnnnnnnnnnnnnnnnnnnnnnnnnnnnnnnnnnnnnnnnnnnnnnnnnnnnnnnnnnnnnnnnnnnnnnnnnnnnnnnnnnnnnnnnnnnnnnnnnnnnnnnnnnnnnnnnnnnnnnnnnnnnnnnnnnnnnnnnnnnnnnnnnnnnnnnnnnnnnnnnnnnnnnnnnnnnnnnnnnnnnnnnnnnnnnnnnnnnnnnnnnnnnnnnnnnnnnnnnnnnnnnnnnnnnnnnnnnnnnnnnnnnnnnnnnnnnnnnnnnnnnnnnnnnnnnnnnnnnnnnnnnnnnnnnnnnnnnnnnnnnnnnnnnnnnnnnnnnnnnnnnnnnnnnnnnnnnnnnnnnnnnnnnnnnnnnnnnnnnnnnnnnnnnnnnnnnnnnnnnnnnnnnnnnnnnnnnnnnnnnnnnnnnnnnnnnnnnnnnnnnnnnnnnnnnnnnnnnnnnnnnnnnnnnnnnnnnnnnnnnnnnnnnnnnnnnnnnnnnnnnnnnnnnnnnnnnnnnnnnnnnnnnnnnnnnnnnnnnnnnnnnnnnnnnnnnnnnnnnnnnnnnnnnnnnnnnnnnnnnnnnnnnnnnnnnnnnnnnnnnnnnnnnnnnnnnnnnnnnnnnnnnnnnnnnnnnnnnnnnnnnnnnnnnnnnnnnnnnnnnnnnnnnnnnnnnnnnnnnnnnnnnnnnnnnnnnnnnnnnnnnnnnnnnnnnnnnnnnnnnnnnnnnnnnnnnnnnnnnnnnnnnnnnnnnnnnnnnnnnnnnnnnnnnnnnnnnnnnnnnnnnnnnnnnnnnnnnnnnnnnnnnnnnnnnnnnnnnnnnnnnnnnnnnnnnnnnnnnnnnnnnnnnnnnnnnnnnnnnnnnnnnnnnnnnnnnnnnnnnnnnnnnnnnnnnnnnnnnnnnnnnnnnnnnnnnnnnnnnnnnnnnnnnnnnnnnnnnnnnnnnnnnnnnnnnnnnnnnnnnnnnnnnnnnnnnnnnnnnnnnnnnnnnnnnnnnnnnnnnnnnnnnnnnnnnnnnnnnnnnnnnnnnnnnnnnnnnnnnnnnnnnnnnnnnnnnnnnnnnnnnnnnnnnnnnnnnnnnnnnnnnnnnnnnnnnnnnnnnnnnnnnnnnnnnnnnnnnnnnnnnnnnnnnnnnnnnnnnnnnnnnnnnnnnnnnnnnnnnnnnnnnnnnnnnnnnnnnnnnnnnnnnnnnnnnnnnnnnnnnnnnnnnnnnnnnnnnnnnnnnnnnnnnnnnnnnnnnnnnnnnnnnnnnnnnnnnnnnnnnnnnnnnnnnnnnnnnnnnnnnnnnnnnnnnnnnnnnnnnnnnnnnnnnnnnnnnnnnnnnnnnnnnnnnnnnnnnnnnnnnnnnnnnnnnnnnnnnnnnnnnnnnnnnnnnnnnnnnnnnnnnnnnnnnnnnnnnnnnnnnnnnnnnnnnnnnnnnnnnnnnnnnnnnnnnnnnnnnnnnnnnnnnnnnnnnnnnnnnnnnnnnnnnnnnnnnnnnnnnnnnnnnnnnnnnnnnnnnnnnnnnnnnnnnnnnnnnnnnnnnnnnnnnnnnnnnnnnnnnnnnnnnnnnnnnnnnnnnnnnnnnnnnnnnnnnnnnnnnnnnnnnnnnnnnnnnnnnnnnnnnnnnnnnnnnnnnnnnnnnnnnnnnnnnnnnnnnnnnnnnnnnnnnnnnnnnnnnnnnnnnnnnnnnnnnnnnnnnnnnnnnnnnnnnnnnnnnnnnnnnnnnnnnnnnnnnnnnnnnnnnnnnnnnnnnnnnnnnnnnnnnnnnnnnnnnnnnnnnnnnnnnnnnnnnnnnnnnnnnnnnnnnnnnnnnnnnnnnnnnnnnnnnnnnnnnnnnnnnnnnnnnnnnnnnnnnnnnnnnnnnnnnnnnnnnnnnnnnnnnnnnnnnnnnnnnnnnnnnnnnnnnnnnnnnnnnnnnnnnnnnnnnnnnnnnnnnnnnnnnnnnnnnnnnnnnnnnnnnnnnnnnnnnnnnnnnnnnnnnnnnnnnnnnnnnnnnnnnnnnnnnnnnnnnnnnnnnnnnnnnnnnnnnnnnnnnnnnnnnnnnnnnnnnnnnnnnnnnnnnnnnnnnnnnnnnnnnnnnnnnnnnnnnnnnnnnnnnnnnnnnnnnnnnnnnnnnnnnnnnnnnnnnnnnnnnnnnnnnnnnnnnnnnnnnnnnnnnnnnnnnnnnnnnnnnnnnnnnnnnnnnnnnnnnnnnnnnnnnnnnnnnnnnnnnnnnnnnnnnnnnnnnnnnnnnnnnnnnnnnnnnnnnnnnnnnnnnnnnnnnnnnnnnnnnnnnnnnnnnnnnnnnnnnnnnnnnnnnnnnnnnnnnnnnnnnnnnnnnnnnnnnnnnnnnnnnnnnnnnnnnnnnnnnnnnnnnnnnnnnnnnnnnnnnnnnnnnnnnnnnnnnnnnnnnnnnnnnnnnnnnnnnnnnnnnnnnnnnnnnnnnnnnnnnnnnnnnnnnnnnnnnnnnnnnnnnnnnnnnnnnnnnnnnnnnnnnnnnnnnnnnnnnnnnnnnnnnnnnnnnnnnnnnnnnnnnnnnnnnnnnnnnnnnnnnnnnnnnnnnnnnnnnnnnnnnnnnnnnnnnnnnnnnnnnnnnnnnnnnnnnnnnnnnnnnnnnnnnnnnnnnnnnnnnnnnnnnnnnnnnnnnnnnnnnnnnnnnnnnnnnnnnnnnnnnnnnnnnnnnnnnnnnnnnnnnnnnnnnnnnnnnnnnnnnnnnnnnnnnnnnnnnnnnnnnnnnnnnnnnnnnnnnnnnnnnnnnnnnnnnnnnnnnnnnnnnnnnnnnnnnnnnnnnnnnnnnnnnnnnnnnnnnnnnnnnnnnnnnnnnnnnnnnnnnnnnnnnnnnnnnnnnnnnnnnnnnnnnnnnnnnnnnnnnnnnnnnnnnnnnnnnnnnnnnnnnnnnnnnnnnnnnnnnnnnnnnnnnnnnnnnnnnnnnnnnnnnnnnnnnnnnnnnnnnnnnnnnnnnnnnnnnnnnnnnnnnnnnnnnnnnnnnnnnnnnnnnnnnnnnnnnnnnnnnnnnnnnnnnnnnnnnnnnnnnnnnnnnnnnnnnnnnnnnnnnnnnnnnnnnnnnnnnnnnnnnnnnnnnnnnnnnnnnnnnnnnnnnnnnnnnnnnnnnnnnnnnnnnnnnnnnnnnnnnnnnnnnnnnnnnnnnnnnnnnnnnnnnnnnnnnnnnnnnnnnnnnnnnnnnnnnnnnnnnnnnnnnnnnnnnnnnnnnnnnnnnnnnnnnnnnnnnnnnnnnnnnnnnnnnnnnnnnnnnnnnnnnnnnnnnnnnnnnnnnnnnnnnnnnnnnnnnnnnnnnnnnnnnnnnnnnnnnnnnnnnnnnnnnnnnnnnnnnnnnnnnnnnnnnnnnnnnnnnnnnnnnnnnnnnnnnnnnnnnnnnnnnnnnnnnnnnnnnnnnnnnnnnnnnnnnnnnnnnnnnnnnnnnnnnnnnnnnnnnnnnnnnnnnnnnnnnnnnnnnnnnnnnnnnnnnnnnnnnnnnnnnnnnnnnnnnnnnnnnnnnnnnnnnnnnnnnnnnnnnnnnnnnnnnnnnnnnnnnnnnnnnnnnnnnnnnnnnnnnnnnnnnnnnnnnnnnnnnnnnnnnnnnnnnnnnnnnnnnnnnnnnnnnnnnnnnnnnnnnnnnnnnnnnnnnnnnnnnnnnnnnnnnnnnnnnnnnnnnnnnnnnnnnnnnnnnnnnnnnnnnnnnnnnnnnnnnnnnnnnnnnnnnnnnnnnnnnnnnnnnnnnnnnnnnnnnnnnnnnnnnnnnnnnnnnnnnnnnnnnnnnnnnnnnnnnnnnnnnnnnnnnnnnnnnnnnnnnnnnnnnnnnnnnnnnnnnnnnnnnnnnnnnnnnnnnnnnnnnnnnnnnnnnnnnnnnnnnnnnnnnnnnnnnnnnnnnnnnnnnnnnnnnnnnnnnnnnnnnnnnnnnnnnnnnnnnnnnnnnnnnnnnnnnnnnnnnnnnnnnnnnnnnnnnnnnnnnnnnnnnnnnnnnnnnnnnnnnnnnnnnnnnnnnnnnnnnnnnnnnnnnnnnnnnnnnnnnnnnnnnnnnnnnnnnnnnnnnnnnnnnnnnnnnnnnnnnnnnnnnnnnnnnnnnnnnnnnnnnnnnnnnnnnnnnnnnnnnnnnnnnnnnnnnnnnnnnnnnnnnnnnnnnnnnnnnnnnnnnnnnnnnnnnnnnnnnnnnnnnnnnnnnnnnnnnnnnnnnnnnnnnnnnnnnnnnnnnnnnnnnnnnnnnnnnnnnnnnnnnnnnnnnnnnnnnnnnnnnnnnnnnnnnnnnnnnnnnnnnnnnnnnnnnnnnnnnnnnnnnnnnnnnnnnnnnnnnnnnnnnnnnnnnnnnnnnnnnnnnnnnnnnnnnnnnnnnnnnnnnnnnnnnnnnnnnnnnnnnnnnnnnnnnnnnnnnnnnnnnnnnnnnnnnnnnnnnnnnnnnnnnnnnnnnnnnnnnnnnnnnnnnnnnnnnnnnnnnnnnnnnnnnnnnnnnnnnnnnnnnnnnnnnnnnnnnnnnnnnnnnnnnnnnnnnnnnnnnnnnnnnnnnnnnnnnnnnnnnnnnnnnnnnnnnnnnnnnnnnnnnnnnnnnnnnnnnnnnnnnnnnnnnnnnnnnnnnnnnnnnnnnnnnnnnnnnnnnnnnnnnnnnnnnnnnnnnnnnnnnnnnnnnnnnnnnnnnnnnnnnnnnnnnnnnnnnnnnnnnnnnnnnnnnnnnnnnnnnnnnnnnnnnnnnnnnnnnnnnnnnnnnnnnnnnnnnnnnnnnnnnnnnnnnnnnnnnnnnnnnnnnnnnnnnnnnnnnnnnnnnnnnnnnnnnnnnnnnnnnnnnnnnnnnnnnnnnnnnnnnnnnnnnnnnnnnnnnnnnnnnnnnnnnnnnnnnnnnnnnnnnnnnnnnnnnnnnnnnnnnnnnnnnnnnnnnnnnnnnnnnnnnnnnnnnnnnnnnnnnnnnnnnnnnnnnnnnnnnnnnnnnnnnnnnnnnnnnnnnnnnnnnnnnnnnnnnnnnnnnnnnnnnnnnnnnnnnnnnnnnnnnnnnnnnnnnnnnnnnnnnnnnnnnnnnnnnnnnnnnnnnnnnnnnnnnnnnnnnnnnnnnnnnnnnnnnnnnnnnnnnnnnnnnnnnnnnnnnnnnnnnnnnnnnnnnnnnnnnnnnnnnnnnnnnnnnnnnnnnnnnnnnnnnnnnnnnnnnnnnnnnnnnnnnnnnnnnnnnnnnnnnnnnnnnnnnnnnnnnnnnnnnnnnnnnnnnnnnnnnnnnnnnnnnnnnnnnnnnnnnnnnnnnnnnnnnnnnnnnnnnnnnnnnnnnnnnnnnnnnnnnnnnnnnnnnnnnnnnnnnnnnnnnnnnnnnnnnnnnnnnnnnnnnnnnnnnnnnnnnnnnnnnnnnnnnnnnnnnnnnnnnnnnnnnnnnnnnnnnnnnnnnnnnnnnnnnnnnnnnnnnnnnnnnnnnnnnnnnnnnnnnnnnnnnnnnnnnnnnnnnnnnnnnnnnnnnnnnnnnnnnnnnnnnnnnnnnnnnnnnnnnnnnnnnnnnnnnnnnnnnnnnnnnnnnnnnnnnnnnnnnnnnnnnnnnnnnnnnnnnnnnnnnnnnnnnnnnnnnnnnnnnnnnnnnnnnnnnnnnnnnnnnnnnnnnnnnnnnnnnnnnnnnnnnnnnnnnnnnnnnnnnnnnnnnnnnnnnnnnnnnnnnnnnnnnnnnnnnnnnnnnnnnnnnnnnnnnnnnnnnnnnnnnnnnnnnnnnnnnnnnnnnnnnnnnnnnnnnnnnnnnnnnnnnnnnnnnnnnnnnnnnnnnnnnnnnnnnnnnnnnnnnnnnnnnnnnnnnnnnnnnnnnnnnnnnnnnnnnnnnnnnnnnnnnnnnnnnnnnnnnnnnnnnnnnnnnnnnnnnnnnnnnnnnnnnnnnnnnnnnnnnnnnnnnnnnnnnnnnnnnnnnnnnnnnnnnnnnnnnnnnnnnnnnnnnnnnnnnnnnnnnnnnnnnnnnnnnnnnnnnnnnnnnnnnnnnnnnnnnnnnnnnnnnnnnnnnnnnnnnnnnnnnnnnnnnnnnnnnnnnnnnnnnnnnnnnnnnnnnnnnnnnnnnnnnnnnnnnnnnnnnnnnnnnnnnnnnnnnnnnnnnnnnnnnnnnnnnnnnnnnnnnnnnnnnnnnnnnnnnnnnnnnnnnnnnnnnnnnnnnnnnnnnnnnnnnnnnnnnnnnnnnnnnnnnnnnnnnnnnnnnnnnnnnnnnnnnnnnnnnnnnnnnnnnnnnnnnnnnnnnnnnnnnnnnnnnnnnnnnnnnnnnnnnnnnnnnnnnnnnnnnnnnnnnnnnnnnnnnnnnnnnnnnnnnnnnnnnnnnnnnnnnnnnnnnnnnnnnnnnnnnnnnnnnnnnnnnnnnnnnnnnnnnnnnnnnnnnnnnnnnnnnnnnnnnnnnnnnnnnnnnnnnnnnnnnnnnnnnnnnnnnnnnnnnnnnnnnnnnnnnnnnnnnnnnnnnnnnnnnnnnnnnnnnnnnnnnnnnnnnnnnnnnnnnnnnnnnnnnnnnnnnnnnnnnnnnnnnnnnnnnnnnnnnnnnnnnnnnnnnnnnnnnnnnnnnnnnnnnnnnnnnnnnnnnnnnnnnnnnnnnnnnnnnnnnnnnnnnnnnnnnnnnnnnnnnnnnnnnnnnnnnnnnnnnnnnnnnnnnnnnnnnnnnnnnnnnnnnnnnnnnnnnnnnnnnnnnnnnnnnnnnnnnnnnnnnnnnnnnnnnnnnnnnnnnnnnnnnnnnnnnnnnnnnnnnnnnnnnnnnnnnnnnnnnnnnnnnnnnnnnnnnnnnnnnnnnnnnnnnnnnnnnnnnnnnnnnnnnnnnnnnnnnnnnnnnnnnnnnnnnnnnnnnnnnnnnnnnnnnnnnnnnnnnnnnnnnnnnnnnnnnnnnnnnnnnnnnnnnnnnnnnnnnnnnnnnnnnnnnnnnnnnnnnnnnnnnnnnnnnnnnnnnnnnnnnnnnnnnnnnnnnnnnnnnnnnnnnnnnnnnnnnnnnnnnnnnnnnnnnnnnnnnnnnnnnnnnnnnnnnnnnnnnnnnnnnnnnnnnnnnnnnnnnnnnnnnnnnnnnnnnnnnnnnnnnnnnnnnnnnnnnnnnnnnnnnnnnnnnnnnnnnnnnnnnnnnnnnnnnnnnnnnnnnnnnnnnnnnnnnnnnnnnnnnnnnnnnnnnnnnnnnnnnnnnnnnnnnnnnnnnnnnnnnnnnnnnnnnnnnnnnnnnnnnnnnnnnnnnnnnnnnnnnnnnnnnnnnnnnnnnnnnnnnnnnnnnnnnnnnnnnnnnnnnnnnnnnnnnnnnnnnnnnnnnnnnnnnnnnnnnnnnnnnnnnnnnnnnnnnnnnnnnnnnnnnnnnnnnnnnnnnnnnnnnnnnnnnnnnnnnnnnnnnnnnnnnnnnnnnnnnnnnnnnnnnnnnnnnnnnnnnnnnnnnnnnnnnnnnnnnnnnnnnnnnnnnnnnnnnnnnnnnnnnnnnnnnnnnnnnnnnnnnnnnnnnnnnnnnnnnnnnnnnnnnnnnnnnnnnnnnnnnnnnnnnnnnnnnnnnnnnnnnnnnnnnnnnnnnnnnnnnnnnnnnnnnnnnnnnnnnnnnnnnnnnnnnnnnnnnnnnnnnnnnnnnnnnnnnnnnnnnnnnnnnnnnnnnnnnnnnnnnnnnnnnnnnnnnnnnnnnnnnnnnnnnnnnnnnnnnnnnnnnnnnnnnnnnnnnnnnnnnnnnnnnnnnnnnnnnnnnnnnnnnnnnnnnnnnnnnnnnnnnnnnnnnnnnnnnnnnnnnnnnnnnnnnnnnnnnnnnnnnnnnnnnnnnnnnnnnnnnnnnnnnnnnnnnnnnnnnnnnnnnnnnnnnnnnnnnnnnnnnnnnnnnnnnnnnnnnnnnnnnnnnnnnnnnnnnnnnnnnnnnnnnnnnnnnnnnnnnnnnnnnnnnnnnnnnnnnnnnnnnnnnnnnnnnnnnnnnnnnnnnnnnnnnnnnnnnnnnnnnnnnnnnnnnnnnnnnnnnnnnnnnnnnnnnnnnnnnnnnnnnnnnnnnnnnnnnnnnnnnnnnnnnnnnnnnnnnnnnnnnnnnnnnnnnnnnnnnnnnnnnnnnnnnnnnnnnnnnnnnnnnnnnnnnnnnnnnnnnnnnnnnnnnnnnnnnnnnnnnnnnnnnnnnnnnnnnnnnnnnnnnnnnnnnnnnnnnnnnnnnnnnnnnnnnnnnnnnnnnnnnnnnnnnnnnnnnnnnnnnnnnnnnnnnnnnnnnnnnnnnnnnnnnnnnnnnnnnnnnnnnnnnnnnnnnnnnnnnnnnnnnnnnnnnnnnnnnnnnnnnnnnnnnnnnnnnnnnnnnnnnnnnnnnnnnnnnnnnnnnnnnnnnnnnnnnnnnnnnnnnnnnnnnnnnnnnnnnnnnnnnnnnnnnnnnnnnnnnnnnnnnnnnnnnnnnnnnnnnnnnnnnnnnnnnnnnnnnnnnnnnnnnnnnnnnnnnnnnnnnnnnnnnnnnnnnnnnnnnnnnnnnnnnnnnnnnnnnnnnnnnnnnnnnnnnnnnnnnnnnnnnnnnnnnnnnnnnnnnnnnnnnnnnnnnnnnnnnnnnnnnnnnnnnnnnnnnnnnnnnnnnnnnnnnnnnnnnnnnnnnnnnnnnnnnnnnnnnnnnnnnnnnnnnnnnnnnnnnnnnnnnnnnnnnnnnnnnnnnnnnnnnnnnnnnnnnnnnnnnnnnnnnnnnnnnnnnnnnnnnnnnnnnnnnnnnnnnnnnnnnnnnnnnnnnnnnnnnnnnnnnnnnnnnnnnnnnnnnnnnnnnnnnnnnnnnnnnnnnnnnnnnnnnnnnnnnnnnnnnnnnnnnnnnnnnnnnnnnnnnnnnnnnnnnnnnnnnnnnnnnnnnnnnnnnnnnnnnnnnnnnnnnnnnnnnnnnnnnnnnnnnnnnnnnnnnnnnnnnnnnnnnnnnnnnnnnnnnnnnnnnnnnnnnnnnnnnnnnnnnnnnnnnnnnnnnnnnnnnnnnnnnnnnnnnnnnnnnnnnnnnnnnnnnnnnnnnnnnnnnnnnnnnnnnnnnnnnnnnnnnnnnnnnnnnnnnnnnnnnnnnnnnnnnnnnnnnnnnnnnnnnnnnnnnnnnnnnnnnnnnnnnnnnnnnnnnnnnnnnnnnnnnnnnnnnnnnnnnnnnnnnnnnnnnnnnnnnnnnnnnnnnnnnnnnnnnnnnnnnnnnnnnnnnnnnnnnnnnnnnnnnnnnnnnnnnnnnnnnnnnnnnnnnnnnnnnnnnnnnnnnnnnnnnnnnnnnnnnnnnnnnnnnnnnnnnnnnnnnnnnnnnnnnnnnnnnnnnnnnnnnnnnnnnnnnnnnnnnnnnnnnnnnnnnnnnnnnnnnnnnnnnnnnnnnnnnnnnnnnnnnnnnnnnnnnnnnnnnnnnnnnnnnnnnnnnnnnnnnnnnnnnnnnnnnnnnnnnnnnnnnnnnnnnnnnnnnnnnnnnnnnnnnnnnnnnnnnnnnnnnnnnnnnnnnnnnnnnnnnnnnnnnnnnnnnnnnnnnnnnnnnnnnnnnnnnnnnnnnnnnnnnnnnnnnnnnnnnnnnnnnnnnnnnnnnnnnnnnnnnnnnnnnnnnnnnnnnnnnnnnnnnnnnnnnnnnnnnnnnnnnnnnnnnnnnnnnnnnnnnnnnnnnnnnnnnnnnnnnnnnnnnnnnnnnnnnnnnnnnnnnnnnnnnnnnnnnnnnnnnnnnnnnnnnnnnnnnnnnnnnnnnnnnnnnnnnnnnnnnnnnnnnnnnnnnnnnnnnnnnnnnnnnnnnnnnnnnnnnnnnnnnnnnnnnnnnnnnnnnnnnnnnnnnnnnnnnnnnnnnnnnnnnnnnnnnnnnnnnnnnnnnnnnnnnnnnnnnnnnnnnnnnnnnnnnnnnnnnnnnnnnnnnnnnnnnnnnnnnnnnnnnnnnnnnnnnnnnnnnnnnnnnnnnnnnnnnnnnnnnnnnnnnnnnnnnnnnnnnnnnnnnnnnnnnnnnnnnnnnnnnnnnnnnnnnnnnnnnnnnnnnnnnnnnnnnnnnnnnnnnnnnnnnnnnnnnnnnnnnnnnnnnnnnnnnnnnnnnnnnnnnnnnnnnnnnnnnnnnnnnnnnnnnnnnnnnnnnnnnnnnnnnnnnnnnnnnnnnnnnnnnnnnnnnnnnnnnnnnnnnnnnnnnnnnnnnnnnnnnnnnnnnnnnnnnnnnnnnnnnnnnnnnnnnnnnnnnnnnnnnnnnnnnnnnnnnnnnnnnnnnnnnnnnnnnnnnnnnnnnnnnnnnnnnnnnnnnnnnnnnnnnnnnnnnnnnnnnnnnnnnnnnnnnnnnnnnnnnnnnnnnnnnnnnnnnnnnnnnnnnnnnnnnnnnnnnnnnnnnnnnnnnnnnnnnnnnnnnnnnnnnnnnnnnnnnnnnnnnnnnnnnnnnnnnnnnnnnnnnnnnnnnnnnnnnnnnnnnnnnnnnnnnnnnnnnnnnnnnnnnnnnnnnnnnnnnnnnnnnnnnnnnnnnnnnnnnnnnnnnnnnnnnnnnnnnnnnnnnnnnnnnnnnnnnnnnnnnnnnnnnnnnnnnnnnnnnnnnnnnnnnnnnnnnnnnnnnnnnnnnnnnnnnnnnnnnnnnnnnnnnnnnnnnnnnnnnnnnnnnnnnnnnnnnnnnnnnnnnnnnnnnnnnnnnnnnnnnnnnnnnnnnnnnnnnnnnnnnnnnnnnnnnnnnnnnnnnnnnnnnnnnnnnnnnnnnnnnnnnnnnnnnnnnnnnnnnnnnnnnnnnnnnnnnnnnnnnnnnnnnnnnnnnnnnnnnnnnnnnnnnnnnnnnnnnnnnnnnnnnnnnnnnnnnnnnnnnnnnnnnnnnnnnnnnnnnnnnnnnnnnnnnnnnnnnnnnnnnnnnnnnnnnnnnnnnnnnnnnnnnnnnnnnnnnnnnnnnnnnnnnnnnnnnnnnnnnnnnnnnnnnnnnnnnnnnnnnnnnnnnnnnnnnnnnnnnnnnnnnnnnnnnnnnnnnnnnnnnnnnnnnnnnnnnnnnnnnnnnnnnnnnnnnnnnnnnnnnnnnnnnnnnnnnnnnnnnnnnnnnnnnnnnnnnnnnnnnnnnnnnnnnnnnnnnnnnnnnnnnnnnnnnnnnnnnnnnnnnnnnnnnnnnnnnnnnnnnnnnnnnnnnnnnnnnnnnnnnnnnnnnnnnnnnnnnnnnnnnnnnnnnnnnnnnnnnnnnnnnnnnnnnnnnnnnnnnnnnnnnnnnnnnnnnnnnnnnnnnnnnnnnnnnnnnnnnnnnnnnnnnnnnnnnnnnnnnnnnnnnnnnnnnnnnnnnnnnnnnnnnnnnnnnnnnnnnnnnnnnnnnnnnnnnnnnnnnnnnnnnnnnnnnnnnnnnnnnnnnnnnnnnnnnnnnnnnnnnnnnnnnnnnnnnnnnnnnnnnnnnnnnnnnnnnnnnnnnnnnnnnnnnnnnnnnnnnnnnnnnnnnnnnnnnnnnnnnnnnnnnnnnnnnnnnnnnnnnnnnnnnnnnnnnnnnnnnnnnnnnnnnnnnnnnnnnnnnnnnnnnnnnnnnnnnnnnnnnnnnnnnnnnnnnnnnnnnnnnnnnnnnnnnnnnnnnnnnnnnnnnnnnnnnnnnnnnnnnnnnnnnnnnnnnnnnnnnnnnnnnnnnnnnnnnnnnnnnnnnnnnnnnnnnnnnnnnnnnnnnnnnnnnnnnnnnnnnnnnnnnnnnnnnnnnnnnnnnnnnnnnnnnnnnnnnnnnnnnnnnnnnnnnnnnnnnnnnnnnnnnnnnnnnnnnnnnnnnnnnnnnnnnnnnnnnnnnnnnnnnnnnnnnnnnnnnnnnnnnnnnnnnnnnnnnnnnnnnnnnnnnnnnnnnnnnnnnnnnnnnnnnnnnnnnnnnnnnnnnnnnnnnnnnnnnnnnnnnnnnnnnnnnnnnnnnnnnnnnnnnnnnnnnnnnnnnnnnnnnnnnnnnnnnnnnnnnnnnnnnnnnnnnnnnnnnnnnnnnnnnnnnnnnnnnnnnnnnnnnnnnnnnnnnnnnnnnnnnnnnnnnnnnnnnnnnnnnnnnnnnnnnnnnnnnnnnnnnnnnnnnnnnnnnnnnnnnnnnnnnnnnnnnnnnnnnnnnnnnnnnnnnnnnnnnnnnnnnnnnnnnnnnnnnnnnnnnnnnnnnnnnnnnnnnnnnnnnnnnnnnnnnnnnnnnnnnnnnnnnnnnnnnnnnnnnnnnnnnnnnnnnnnnnnnnnnnnnnnnnnnnnnnnnnnnnnnnnnnnnnnnnnnnnnnnnnnnnnnnnnnnnnnnnnnnnnnnnnnnnnnnnnnnnnnnnnnnnnnnnnnnnnnnnnnnnnnnnnnnnnnnnnnnnnnnnnnnnnnnnnnnnnnnnnnnnnnnnnnnnnnnnnnnnnnnnnnnnnnnnnnnnnnnnnnnnnnnnnnnnnnnnnnnnnnnnnnnnnnnnnnnnnnnnnnnnnnnnnnnnnnnnnnnnnnnnnnnnnnnnnnnnnnnnnnnnnnnnnnnnnnnnnnnnnnnnnnnnnnnnnnnnnnnnnnnnnnnnnnnnnnnnnnnnnnnnnnnnnnnnnnnnnnnnnnnnnnnnnnnnnnnnnnnnnnnnnnnnnnnnnnnnnnnnnnnnnnnnnnnnnnnnnnnnnnnnnnnnnnnnnnnnnnnnnnnnnnnnnnnnnnnnnnnnnnnnnnnnnnnnnnnnnnnnnnnnnnnnnnnnnnnnnnnnnnnnnnnnnnnnnnnnnnnnnnnnnnnnnnnnnnnnnnnnnnnnnnnnnnnnnnnnnnnnnnnnnnnnnnnnnnnnnnnnnnnnnnnnnnnnnnnnnnnnnnnnnnnnnnnnnnnnnnnnnnnnnnnnnnnnnnnnnnnnnnnnnnnnnnnnnnnnnnnnnnnnnnnnnnnnnnnnnnnnnnnnnnnnnnnnnnnnnnnnnnnnnnnnnnnnnnnnnnnnnnnnnnnnnnnnnnnnnnnnnnnnnnnnnnnnnnnnnnnnnnnnnnnnnnnnnnnnnnnnnnnnnnnnnnnnnnnnnnnnnnnnnnnnnnnnnnnnnnnnnnnnnnnnnnnnnnnnnnnnnnnnnnnnnnnnnnnnnnnnnnnnnnnnnnnnnnnnnnnnnnnnnnnnnnnnnnnnnnnnnnnnnnnnnnnnnnnnnnnnnnnnnnnnnnnnnnnnnnnnnnnnnnnnnnnnnnnnnnnnnnnnnnnnnnnnnnnnnnnnnnnnnnnnnnnnnnnnnnnnnnnnnnnnnnnnnnnnnnnnnnnnnnnnnnnnnnnnnnnnnnnnnnnnnnnnnnnnnnnnnnnnnnnnnnnnnnnnnnnnnnnnnnnnnnnnnnnnnnnnnnnnnnnnnnnnnnnnnnnnnnnnnnnnnnnnnnnnnnnnnnnnnnnnnnnnnnnnnnnnnnnnnnnnnnnnnnnnnnnnnnnnnnnnnnnnnnnnnnnnnnnnnnnnnnnnnnnnnnnnnnnnnnnnnnnnnnnnnnnnnnnnnnnnnnnnnnnnnnnnnnnnnnnnnnnnnnnnnnnnnnnnnnnnnnnnnnnnnnnnnnnnnnnnnnnnnnnnnnnnnnnnnnnnnnnnnnnnnnnnnnnnnnnnnnnnnnnnnnnnnnnnnnnnnnnnnnnnnnnnnnnnnnnnnnnnnnnnnnnnnnnnnnnnnnnnnnnnnnnnnnnnnnnnnnnnnnnnnnnnnnnnnnnnnnnnnnnnnnnnnnnnnnnnnnnnnnnnnnnnnnnnnnnnnnnnnnnnnnnnnnnnnnnnnnnnnnnnnnnnnnnnnnnnnnnnnnnnnnnnnnnnnnnnnnnnnnnnnnnnnnnnnnnnnnnnnnnnnnnnnnnnnnnnnnnnnnnnnnnnnnnnnnnnnnnnnnnnnnnnnnnnnnnnnnnnnnnnnnnnnnnnnnnnnnnnnnnnnnnnnnnnnnnnnnnnnnnnnnnnnnnnnnnnnnnnnnnnnnnnnnnnnnnnnnnnnnnnnnnnnnnnnnnnnnnnnnnnnnnnnnnnnnnnnnnnnnnnnnnnnnnnnnnnnnnnnnnnnnnnnnnnnnnnnnnnnnnnnnnnnnnnnnnnnnnnnnnnnnnnnnnnnnnnnnnnnnnnnnnnnnnnnnnnnnnnnnnnnnnnnnnnnnnnnnnnnnnnnnnnnnnnnnnnnnnnnnnnnnnnnnnnnnnnnnnnnnnnnnnnnnnnnnnnnnnnnnnnnnnnnnnnnnnnnnnnnnnnnnnnnnnnnnnnnnnnnnnnnnnnnnnnnnnnnnnnnnnnnnnnnnnnnnnnnnnnnnnnnnnnnnnnnnnnnnnnnnnnnnnnnnnnnnnnnnnnnnnnnnnnnnnnnnnnnnnnnnnnnnnnnnnnnnnnnnnnnnnnnnnnnnnnnnnnnnnnnnnnnnnnnnnnnnnnnnnnnnnnnnnnnnnnnnnnnnnnnnnnnnnnnnnnnnnnnnnnnnnnnnnnnnnnnnnnnnnnnnnnnnnnnnnnnnnnnnnnnnnnnnnnnnnnnnnnnnnnnnnnnnnnnnnnnnnnnnnnnnnnnnnnnnnnnnnnnnnnnnnnnnnnnnnnnnnnnnnnnnnnnnnnnnnnnnnnnnnnnnnnnnnnnnnnnnnnnnnnnnnnnnnnnnnnnnnnnnnnnnnnnnnnnnnnnnnnnnnnnnnnnnnnnnnnnnnnnnnnnnnnnnnnnnnnnnnnnnnnnnnnnnnnnnnnnnnnnnnnnnnnnnnnnnnnnnnnnnnnnnnnnnnnnnnnnnnnnnnnnnnnnnnnnnnnnnnnnnnnnnnnnnnnnnnnnnnnnnnnnnnnnnnnnnnnnnnnnnnnnnnnnnnnnnnnnnnnnnnnnnnnnnnnnnnnnnnnnnnnnnnnnnnnnnnnnnnnnnnnnnnnnnnnnnnnnnnnnnnnnnnnnnnnnnnnnnnnnnnnnnnnnnnnnnnnnnnnnnnnnnnnnnnnnnnnnnnnnnnnnnnnnnnnnnnnnnnnnnnnnnnnnnnnnnnnnnnnnnnnnnnnnnnnnnnnnnnnnnnnnnnnnnnnnnnnnnnnnnnnnnnnnnnnnnnnnnnnnnnnnnnnnnnnnnnnnnnnnnnnnnnnnnnnnnnnnnnnnnnnnnnnnnnnnnnnnnnnnnnnnnnnnnnnnnnnnnnnnnnnnnnnnnnnnnnnnnnnnnnnnnnnnnnnnnnnnnnnnnnnnnnnnnnnnnnnnnnnnnnnnnnnnnnnnnnnnnnnnnnnnnnnnnnnnnnnnnnnnnnnnnnnnnnnnnnnnnnnnnnnnnnnnnnnnnnnnnnnnnnnnnnnnnnnnnnnnnnnnnnnnnnnnnnnnnnnnnnnnnnnnnnnnnnnnnnnnnnnnnnnnnnnnnnnnnnnnnnnnnnnnnnnnnnnnnnnnnnnnnnnnnnnnnnnnnnnnnnnnnnnnnnnnnnnnnnnnnnnnnnnnnnnnnnnnnnnnnnnnnnnnnnnnnnnnnnnnnnnnnnnnnnnnnnnnnnnnnnnnnnnnnnnnnnnnnnnnnnnnnnnnnnnnnnnnnnnnnnnnnnnnnnnnnnnnnnnnnnnnnnnnnnnnnnnnnnnnnnnnnnnnnnnnnnnnnnnnnnnnnnnnnnnnnnnnnnnnnnnnnnnnnnnnnnnnnnnnnnnnnnnnnnnnnnnnnnnnnnnnnnnnnnnnnnnnnnnnnnnnnnnnnnnnnnnnnnnnnnnnnnnnnnnnnnnnnnnnnnnnnnnnnnnnnnnnnnnnnnnnnnnnnnnnnnnnnnnnnnnnnnnnnnnnnnnnnnnnnnnnnnnnnnnnnnnnnnnnnnnnnnnnnnnnnnnnnnnnnnnnnnnnnnnnnnnnnnnnnnnnnnnnnnnnnnnnnnnnnnnnnnnnnnnnnnnnnnnnnnnnnnnnnnnnnnnnnnnnnnnnnnnnnnnnnnnnnnnnnnnnnnnnnnnnnnnnnnnnnnnnnnnnnnnnnnnnnnnnnnnnnnnnnnnnnnnnnnnnnnnnnnnnnnnnnnnnnnnnnnnnnnnnnnnnnnnnnnnnnnnnnnnnnnnnnnnnnnnnnnnnnnnnnnnnnnnnnnnnnnnnnnnnnnnnnnnnnnnnnnnnnnnnnnnnnnnnnnnnnnnnnnnnnnnnnnnnnnnnnnnnnnnnnnnnnnnnnnnnnnnnnnnnnnnnnnnnnnnnnnnnnnnnnnnnnnnnnnnnnnnnnnnnnnnnnnnnnnnnnnnnnnnnnnnnnnnnnnnnnnnnnnnnnnnnnnnnnnnnnnnnnnnnnnnnnnnnnnnnnnnnnnnnnnnnnnnnnnnnnnnnnnnnnnnnnnnnnnnnnnnnnnnnnnnnnnnnnnnnnnnnnnnnnnnnnnnnnnnnnnnnnnnnnnnnnnnnnnnnnnnnnnnnnnnnnnnnnnnnnnnnnnnnnnnnnnnnnnnnnnnnnnnnnnnnnnnnnnnnnnnnnnnnnnnnnnnnnnnnnnnnnnnnnnnnnnnnnnnnnnnnnnnnnnnnnnnnnnnnnnnnnnnnnnnnnnnnnnnnnnnnnnnnnnnnnnnnnnnnnnnnnnnnnnnnnnnnnnnnnnnnnnnnnnnnnnnnnnnnnnnnnnnnnnnnnnnnnnnnnnnnnnnnnnnnnnnnnnnnnnnnnnnnnnnnnnnnnnnnnnnnnnnnnnnnnnnnnnnnnnnnnnnnnnnnnnnnnnnnnnnnnnnnnnnnnnnnnnnnnnnnnnnnnnnnnnnnnnnnnnnnnnnnnnnnnnnnnnnnnnnnnnnnnnnnnnnnnnnnnnnnnnnnnnnnnnnnnnnnnnnnnnnnnnnnnnnnnnnnnnnnnnnnnnnnnnnnnnnnnnnnnnnnnnnnnnnnnnnnnnnnnnnnnnnnnnnnnnnnnnnnnnnnnnnnnnnnnnnnnnnnnnnnnnnnnnnnnnnnnnnnnnnnnnnnnnnnnnnnnnnnnnnnnnnnnnnnnnnnnnnnnnnnnnnnnnnnnnnnnnnnnnnnnnnnnnnnnnnnnnnnnnnnnnnnnnnnnnnnnnnnnnnnnnnnnnnnnnnnnnnnnnnnnnnnnnnnnnnnnnnnnnnnnnnnnnnnnnnnnnnnnnnnnnnnnnnnnnnnnnnnnnnnnnnnnnnnnnnnnnnnnnnnnnnnnnnnnnnnnnnnnnnnnnnnnnnnnnnnnnnnnnnnnnnnnnnnnnnnnnnnnnnnnnnnnnnnnnnnnnnnnnnnnnnnnnnnnnnnnnnnnnnnnnnnnnnnnnnnnnnnnnnnnnnnnnnnnnnnnnnnnnnnnnnnnnnnnnnnnnnnnnnnnnnnnnnnnnnnnnnnnnnnnnnnnnnnnnnnnnnnnnnnnnnnnnnnnnnnnnnnnnnnnnnnnnnnnnnnnnnnnnnnnnnnnnnnnnnnnnnnnnnnnnnnnnnnnnnnnnnnnnnnnnnnnnnnnnnnnnnnnnnnnnnnnnnnnnnnnnnnnnnnnnnnnnnnnnnnnnnnnnnnnnnnnnnnnnnnnnnnnnnnnnnnnnnnnnnnnnnnnnnnnnnnnnnnnnnnnnnnnnnnnnnnnnnnnnnnnnnnnnnnnnnnnnnnnnnnnnnnnnnnnnnnnnnnnnnnnnnnnnnnnnnnnnnnnnnnnnnnnnnnnnnnnnnnnnnnnnnnnnnnnnnnnnnnnnnnnnnnnnnnnnnnnnnnnnnnnnnnnnnnnnnnnnnnnnnnnnnnnnnnnnnnnnnnnnnnnnnnnnnnnnnnnnnnnnnnnnnnnnnnnnnnnnnnnnnnnnnnnnnnnnnnnnnnnnnnnnnnnnnnnnnnnnnnnnnnnnnnnnnnnnnnnnnnnnnnnnnnnnnnnnnnnnnnnnnnnnnnnnnnnnnnnnnnnnnnnnnnnnnnnnnnnnnnnnnnnnnnnnnnnnnnnnnnnnnnnnnnnnnnnnnnnnnnnnnnnnnnnnnnnnnnnnnnnnnnnnnnnnnnnnnnnnnnnnnnnnnnnnnnnnnnnnnnnnnnnnnnnnnnnnnnnnnnnnnnnnnnnnnnnnnnnnnnnnnnnnnnnnnnnnnnnnnnnnnnnnnnnnnnnnnnnnnnnnnnnnnnnnnnnnnnnnnnnnnnnnnnnnnnnnnnnnnnnnnnnnnnnnnnnnnnnnnnnnnnnnnnnnnnnnnnnnnnnnnnnnnnnnnnnnnnnnnnnnnnnnnnnnnnnnnnnnnnnnnnnnnnnnnnnnnnnnnnnnnnnnnnnnnnnnnnnnnnnnnnnnnnnnnnnnnnnnnnnnnnnnnnnnnnnnnnnnnnnnnnnnnnnnnnnnnnnnnnnnnnnnnnnnnnnnnnnnnnnnnnnnnnnnnnnnnnnnnnnnnnnnnnnnnnnnnnnnnnnnnnnnnnnnnnnnnnnnnnnnnnnnnnnnnnnnnnnnnnnnnnnnnnnnnnnnnnnnnnnnnnnnnnnnnnnnnnnnnnnnnnnnnnnnnnnnnnnnnnnnnnnnnnnnnnnnnnnnnnnnnnnnnnnnnnnnnnnnnnnnnnnnnnnnnnnnnnnnnnnnnnnnnnnnnnnnnnnnnnnnnnnnnnnnnnnnnnnnnnnnnnnnnnnnnnnnnnnnnnnnnnnnnnnnnnnnnnnnnnnnnnnnnnnnnnnnnnnnnnnnnnnnnnnnnnnnnnnnnnnnnnnnnnnnnnnnnnnnnnnnnnnnnnnnnnnnnnnnnnnnnnnnnnnnnnnnnnnnnnnnnnnnnnnnnnnnnnnnnnnnnnnnnnnnnnnnnnnnnnnnnnnnnnnnnnnnnnnnnnnnnnnnnnnnnnnnnnnnnnnnnnnnnnnnnnnnnnnnnnnnnnnnnnnnnnnnnnnnnnnnnnnnnnnnnnnnnnnnnnnnnnnnnnnnnnnnnnnnnnnnnnnnnnnnnnnnnnnnnnnnnnnnnnnnnnnnnnnnnnnnnnnnnnnnnnnnnnnnnnnnnnnnnnnnnnnnnnnnnnnnnnnnnnnnnnnnnnnnnnnnnnnnnnnnnnnnnnnnnnnnnnnnnnnnnnnnnnnnnnnnnnnnnnnnnnnnnnnnnnnnnnnnnnnnnnnnnnnnnnnnnnnnnnnnnnnnnnnnnnnnnnnnnnnnnnnnnnnnnnnnnnnnnnnnnnnnnnnnnnnnnnnnnnnnnnnnnnnnnnnnnnnnnnnnnnnnnnnnnnnnnnnnnnnnnnnnnnnnnnnnnnnnnnnnnnnnnnnnnnnnnnnnnnnnnnnnnnnnnnnnnnnnnnnnnnnnnnnnnnnnnnnnnnnnnnnnnnnnnnnnnnnnnnnnnnnnnnnnnnnnnnnnnnnnnnnnnnnnnnnnnnnnnnnnnnnnnnnnnnnnnnnnnnnnnnnnnnnnnnnnnnnnnnnnnnnnnnnnnnnnnnnnnnnnnnnnnnnnnnnnnnnnnnnnnnnnnnnnnnnnnnnnnnnnnnnnnnnnnnnnnnnnnnnnnnnnnnnnnnnnnnnnnnnnnnnnnnnnnnnnnnnnnnnnnnnnnnnnnnnnnnnnnnnnnnnnnnnnnnnnnnnnnnnnnnnnnnnnnnnnnnnnnnnnnnnnnnnnnnnnnnnnnnnnnnnnnnnnnnnnnnnnnnnnnnnnnnnnnnnnnnnnnnnnnnnnnnnnnnnnnnnnnnnnnnnnnnnnnnnnnnnnnnnnnnnnnnnnnnnnnnnnnnnnnnnnnnnnnnnnnnnnnnnnnnnnnnnnnnnnnnnnnnnnnnnnnnnnnnnnnnnnnnnnnnnnnnnnnnnnnnnnnnnnnnnnnnnnnnnnnnnnnnnnnnnnnnnnnnnnnnnnnnnnnnnnnnnnnnnnnnnnnnnnnnnnnnnnnnnnnnnnnnnnnnnnnnnnnnnnnnnnnnnnnnnnnnnnnnnnnnnnnnnnnnnnnnnnnnnnnnnnnnnnnnnnnnnnnnnnnnnnnnnnnnnnnnnnnnnnnnnnnnnnnnnnnnnnnnnnnnnnnnnnnnnnnnnnnnnnnnnnnnnnnnnnnnnnnnnnnnnnnnnnnnnnnnnnnnnnnnnnnnnnnnnnnnnnnnnnnnnnnnnnnnnnnnnnnnnnnnnnnnnnnnnnnnnnnnnnnnnnnnnnnnnnnnnnnnnnnnnnnnnnnnnnnnnnnnnnnnnnnnnnnnnnnnnnnnnnnnnnnnnnnnnnnnnnnnnnnnnnnnnnnnnnnnnnnnnnnnnnnnnnnnnnnnnnnnnnnnnnnnnnnnnnnnnnnnnnnnnnnnnnnnnnnnnnnnnnnnnnnnnnnnnnnnnnnnnnnnnnnnnnnnnnnnnnnnnnnnnnnnnnnnnnnnnnnnnnnnnnnnnnnnnnnnnnnnnnnnnnnnnnnnnnnnnnnnnnnnnnnnnnnnnnnnnnnnnnnnnnnnnnnnnnnnnnnnnnnnnnnnnnnnnnnnnnnnnnnnnnnnnnnnnnnnnnnnnnnnnnnnnnnnnnnnnnnnnnnnnnnnnnnnnnnnnnnnnnnnnnnnnnnnnnnnnnnnnnnnnnnnnnnnnnnnnnnnnnnnnnnnnnnnnnnnnnnnnnnnnnnnnnnnnnnnnnnnnnnnnnnnnnnnnnnnnnnnnnnnnnnnnnnnnnnnnnnnnnnnnnnnnnnnnnnnnnnnnnnnnnnnnnnnnnnnnnnnnnnnnnnnnnnnnnnnnnnnnnnnnnnnnnnnnnnnnnnnnnnnnnnnnnnnnnnnnnnnnnnnnnnnnnnnnnnnnnnnnnnnnnnnnnnnnnnnnnnnnnnnnnnnnnnnnnnnnnnnnnnnnnnnnnnnnnnnnnnnnnnnnnnnnnnnnnnnnnnnnnnnnnnnnnnnnnnnnnnnnnnnnnnnnnnnnnnnnnnnnnnnnnnnnnnnnnnnnnnnnnnnnnnnnnnnnnnnnnnnnnnnnnnnnnnnnnnnnnnnnnnnnnnnnnnnnnnnnnnnnnnnnnnnnnnnnnnnnnnnnnnnnnnnnnnnnnnnnnnnnnnnnnnnnnnnnnnnnnnnnnnnnnnnnnnnnnnnnnnnnnnnnnnnnnnnnnnnnnnnnnnnnnnnnnnnnnnnnnnnnnnnnnnnnnnnnnnnnnnnnnnnnnnnnnnnnnnnnnnnnnnnnnnnnnnnnnnnnnnnnnnnnnnnnnnnnnnnnnnnnnnnnnnnnnnnnnnnnnnnnnnnnnnnnnnnnnnnnnnnnnnnnnnnnnnnnnnnnnnnnnnnnnnnnnnnnnnnnnnnnnnnnnnnnnnnnnnnnnnnnnnnnnnnnnnnnnnnnnnnnnnnnnnnnnnnnnnnnnnnnnnnnnnnnnnnnnnnnnnnnnnnnnnnnnnnnnnnnnnnnnnnnnnnnnnnnnnnnnnnnnnnnnnnnnnnnnnnnnnnnnnnnnnnnnnnnnnnnnnnnnnnnnnnnnnnnnnnnnnnnnnnnnnnnnnnnnnnnnnnnnnnnnnnnnnnnnnnnnnnnnnnnnnnnnnnnnnnnnnnnnnnnnnnnnnnnnnnnnnnnnnnnnnnnnnnnnnnnnnnnnnnnnnnnnnnnnnnnnnnnnnnnnnnnnnnnnnnnnnnnnnnnnnnnnnnnnnnnnnnnnnnnnnnnnnnnnnnnnnnnnnnnnnnnnnnnnnnnnnnnnnnnnnnnnnnnnnnnnnnnnnnnnnnnnnnnnnnnnnnnnnnnnnnnnnnnnnnnnnnnnnnnnnnnnnnnnnnnnnnnnnnnnnnnnnnnnnnnnnnnnnnnnnnnnnnnnnnnnnnnnnnnnnnnnnnnnnnnnnnnnnnnnnnnnnnnnnnnnnnnnnnnnnnnnnnnnnnnnnnnnnnnnnnnnnnnnnnnnnnnnnnnnnnnnnnnnnnnnnnnnnnnnnnnnnnnnnnnnnnnnnnnnnnnnnnnnnnnnnnnnnnnnnnnnnnnnnnnnnnnnnnnnnnnnnnnnnnnnnnnnnnnnnnnnnnnnnnnnnnnnnnnnnnnnnnnnnnnnnnnnnnnnnnnnnnnnnnnnnnnnnnnnnnnnnnnnnnnnnnnnnnnnnnnnnnnnnnnnnnnnnnnnnnnnnnnnnnnnnnnnnnnnnnnnnnnnnnnnnnnnnnnnnnnnnnnnnnnnnnnnnnnnnnnnnnnnnnnnnnnnnnnnnnnnnnnnnnnnnnnnnnnnnnnnnnnnnnnnnnnnnnnnnnnnnnnnnnnnnnnnnnnnnnnnnnnnnnnnnnnnnnnnnnnnnnnnnnnnnnnnnnnnnnnnnnnnnnnnnnnnnnnnnnnnnnnnnnnnnnnnnnnnnnnnnnnnnnnnnnnnnnnnnnnnnnnnnnnnnnnnnnnnnnnnnnnnnnnnnnnnnnnnnnnnnnnnnnnnnnnnnnnnnnnnnnnnnnnnnnnnnnnnnnnnnnnnnnnnnnnnnnnnnnnnnnnnnnnnnnnnnnnnnnnnnnnnnnnnnnnnnnnnnnnnnnnnnnnnnnnnnnnnnnnnnnnnnnnnnnnnnnnnnnnnnnnnnnnnnnnnnnnnnnnnnnnnnnnnnnnnnnnnnnnnnnnnnnnnnnnnnnnnnnnnnnnnnnnnnnnnnnnnnnnnnnnnnnnnnnnnnnnnnnnnnnnnnnnnnnnnnnnnnnnnnnnnnnnnnnnnnnnnnnnnnnnnnnnnnnnnnnnnnnnnnnnnnnnnnnnnnnnnnnnnnnnnnnnnnnnnnnnnnnnnnnnnnnnnnnnnnnnnnnnnnnnnnnnnnnnnnnnnnnnnnnnnnnnnnnnnnnnnnnnnnnnnnnnnnnnnnnnnnnnnnnnnnnnnnnnnnnnnnnnnnnnnnnnnnnnnnnnnnnnnnnnnnnnnnnnnnnnnnnnnnnnnnnnnnnnnnnnnnnnnnnnnnnnnnnnnnnnnnnnnnnnnnnnnnnnnnnnnnnnnnnnnnnnnnnnnnnnnnnnnnnnnnnnnnnnnnnnnnnnnnnnnnnnnnnnnnnnnnnnnnnnnnnnnnnnnnnnnnnnnnnnnnnnnnnnnnnnnnnnnnnnnnnnnnnnnnnnnnnnnnnnnnnnnnnnnnnnnnnnnnnnnnnnnnnnnnnnnnnnnnnnnnnnnnnnnnnnnnnnnnnnnnnnnnnnnnnnnnnnnnnnnnnnnnnnnnnnnnnnnnnnnnnnnnnnnnnnnnnnnnnnnnnnnnnnnnnnnnnnnnnnnnnnnnnnnnnnnnnnnnnnnnnnnnnnnnnnnnnnnnnnnnnnnnnnnnnnnnnnnnnnnnnnnnnnnnnnnnnnnnnnnnnnnnnnnnnnnnnnnnnnnnnnnnnnnnnnnnnnnnnnnnnnnnnnnnnnnnnnnnnnnnnnnnnnnnnnnnnnnnnnnnnnnnnnnnnnnnnnnnnnnnnnnnnnnnnnnnnnnnnnnnnnnnnnnnnnnnnnnnnnnnnnnnnnnnnnnnnnnnnnnnnnnnnnnnnnnnnnnnnnnnnnnnnnnnnnnnnnnnnnnnnnnnnnnnnnnnnnnnnnnnnnnnnnnnnnnnnnnnnnnnnnnnnnnnnnnnnnnnnnnnnnnnnnnnnnnnnnnnnnnnnnnnnnnnnnnnnnnnnnnnnnnnnnnnnnnnnnnnnnnnnnnnnnnnnnnnnnnnnnnnnnnnnnnnnnnnnnnnnnnnnnnnnnnnnnnnnnnnnnnnnnnnnnnnnnnnnnnnnnnnnnnnnnnnnnnnnnnnnnnnnnnnnnnnnnnnnnnnnnnnnnnnnnnnnnnnnnnnnnnnnnnnnnnnnnnnnnnnnnnnnnnnnnnnnnnnnnnnnnnnnnnnnnnnnnnnnnnnnnnnnnnnnnnnnnnnnnnnnnnnnnnnnnnnnnnnnnnnnnnnnnnnnnnnnnnnnnnnnnnnnnnnnnnnnnnnnnnnnnnnnnnnnnnnnnnnnnnnnnnnnnnnnnnnnnnnnnnnnnnnnnnnnnnnnnnnnnnnnnnnnnnnnnnnnnnnnnnnnnnnnnnnnnnnnnnnnnnnnnnnnnnnnnnnnnnnnnnnnnnnnnnnnnnnnnnnnnnnnnnnnnnnnnnnnnnnnnnnnnnnnnnnnnnnnnnnnnnnnnnnnnnnnnnnnnnnnnnnnnnnnnnnnnnnnnnnnnnnnnnnnnnnnnnnnnnnnnnnnnnnnnnnnnnnnnnnnnnnnnnnnnnnnnnnnnnnnnnnnnnnnnnnnnnnnnnnnnnnnnnnnnnnnnnnnnnnnnnnnnnnnnnnnnnnnnnnnnnnnnnnnnnnnnnnnnnnnnnnnnnnnnnnnnnnnnnnnnnnnnnnnnnnnnnnnnnnnnnnnnnnnnnnnnnnnnnnnnnnnnnnnnnnnnnnnnnnnnnnnnnnnnnnnnnnnnnnnnnnnnnnnnnnnnnnnnnnnnnnnnnnnnnnnnnnnnnnnnnnnnnnnnnnnnnnnnnnnnnnnnnnnnnnnnnnnnnnnnnnnnnnnnnnnnnnnnnnnnnnnnnnnnnnnnnnnnnnnnnnnnnnnnnnnnnnnnnnnnnnnnnnnnnnnnnnnnnnnnnnnnnnnnnnnnnnnnnnnnnnnnnnnnnnnnnnnnnnnnnnnnnnnnnnnnnnnnnnnnnnnnnnnnnnnnnnnnnnnnnnnnnnnnnnnnnnnnnnnnnnnnnnnnnnnnnnnnnnnnnnnnnnnnnnnnnnnnnnnnnnnnnnnnnnnnnnnnnnnnnnnnnnnnnnnnnnnnnnnnnnnnnnnnnnnnnnnnnnnnnnnnnnnnnnnnnnnnnnnnnnnnnnnnnnnnnnnnnnnnnnnnnnnnnnnnnnnnnnnnnnnnnnnnnnnnnnnnnnnnnnnnnnnnnnnnnnnnnnnnnnnnnnnnnnnnnnnnnnnnnnnnnnnnnnnnnnnnnnnnnnnnnnnnnnnnnnnnnnnnnnnnnnnnnnnnnnnnnnnnnnnnnnnnnnnnnnnnnnnnnnnnnnnnnnnnnnnnnnnnnnnnnnnnnnnnnnnnnnnnnnnnnnnnnnnnnnnnnnnnnnnnnnnnnnnnnnnnnnnnnnnnnnnnnnnnnnnnnnnnnnnnnnnnnnnnnnnnnnnnnnnnnnnnnnnnnnnnnnnnnnnnnnnnnnnnnnnnnnnnnnnnnnnnnnnnnnnnnnnnnnnnnnnnnnnnnnnnnnnnnnnnnnnnnnnnnnnnnnnnnnnnnnnnnnnnnnnnnnnnnnnnnnnnnnnnnnnnnnnnnnnnnnnnnnnnnnnnnnnnnnnnnnnnnnnnnnnnnnnnnnnnnnnnnnnnnnnnnnnnnnnnnnnnnnnnnnnnnnnnnnnnnnnnnnnnnnnnnnnnnnnnnnnnnnnnnnnnnnnnnnnnnnnnnnnnnnnnnnnnnnnnnnnnnnnnnnnnnnnnnnnnnnnnnnnnnnnnnnnnnnnnnnnnnnnnnnnnnnnnnnnnnnnnnnnnnnnnnnnnnnnnnnnnnnnnnnnnnnnnnnnnnnnnnnnnnnnnnnnnnnnnnnnnnnnnnnnnnnnnnnnnnnnnnnnnnnnnnnnnnnnnnnnnnnnnnnnnnnnnnnnnnnnnnnnnnnnnnnnnnnnnnnnnnnnnnnnnnnnnnnnnnnnnnnnnnnnnnnnnnnnnnnnnnnnnnnnnnnnnnnnnnnnnnnnnnnnnnnnnnnnnnnnnnnnnnnnnnnnnnnnnnnnnnnnnnnnnnnnnnnnnnnnnnnnnnnnnnnnnnnnnnnnnnnnnnnnnnnnnnnnnnnnnnnnnnnnnnnnnnnnnnnnnnnnnnnnnnnnnnnnnnnnnnnnnnnnnnnnnnnnnnnnnnnnnnnnnnnnnnnnnnnnnnnnnnnnnnnnnnnnnnnnnnnnnnnnnnnnnnnnnnnnnnnnnnnnnnnnnnnnnnnnnnnnnnnnnnnnnnnnnnnnnnnnnnnnnnnnnnnnnnnnnnnnnnnnnnnnnnnnnnnnnnnnnnnnnnnnnnnnnnnnnnnnnnnnnnnnnnnnnnnnnnnnnnnnnnnnnnnnnnnnnnnnnnnnnnnnnnnnnnnnnnnnnnnnnnnnnnnnnnnnnnnnnnnnnnnnnnnnnnnnnnnnnnnnnnnnnnnnnnnnnnnnnnnnnnnnnnnnnnnnnnnnnnnnnnnnnnnnnnnnnnnnnnnnnnnnnnnnnnnnnnnnnnnnnnnnnnnnnnnnnnnnnnnnnnnnnnnnnnnnnnnnnnnnnnnnnnnnnnnnnnnnnnnnnnnnnnnnnnnnnnnnnnnnnnnnnnnnnnnnnnnnnnnnnnnnnnnnnnnnnnnnnnnnnnnnnnnnnnnnnnnnnnnnnnnnnnnnnnnnnnnnnnnnnnnnnnnnnnnnnnnnnnnnnnnnnnnnnnnnnnnnnnnnnnnnnnnnnnnnnnnnnnnnnnnnnnnnnnnnnnnnnnnnnnnnnnnnnnnnnnnnnnnnnnnnnnnnnnnnnnnnnnnnnnnnnnnnnnnnnnnnnnnnnnnnnnnnnnnnnnnnnnnnnnnnnnnnnnnnnnnnnnnnnnnnnnnnnnnnnnnnnnnnnnnnnnnnnnnnnnnnnnnnnnnnnnnnnnnnnnnnnnnnnnnnnnnnnnnnnnnnnnnnnnnnnnnnnnnnnnnnnnnnnnnnnnnnnnnnnnnnnnnnnnnnnnnnnnnnnnnnnnnnnnnnnnnnnnnnnnnnnnnnnnnnnnnnnnnnnnnnnnnnnnnnnnnnnnnnnnnnnnnnnnnnnnnnnnnnnnnnnnnnnnnnnnnnnnnnnnnnnnnnnnnnnnnnnnnnnnnnnnnnnnnnnnnnnnnnnnnnnnnnnnnnnnnnnnnnnnnnnnnnnnnnnnnnnnnnnnnnnnnnnnnnnnnnnnnnnnnnnnnnnnnnnnnnnnnnnnnnnnnnnnnnnnnnnnnnnnnnnnnnnnnnnnnnnnnnnnnnnnnnnnnnnnnnnnnnnnnnnnnnnnnnnnnnnnnnnnnnnnnnnnnnnnnnnnnnnnnnnnnnnnnnnnnnnnnnnnnnnnnnnnnnnnnnnnnnnnnnnnnnnnnnnnnnnnnnnnnnnnnnnnnnnnnnnnnnnnnnnnnnnnnnnnnnnnnnnnnnnnnnnnnnnnnnnnnnnnnnnnnnnnnnnnnnnnnnnnnnnnnnnnnnnnnnnnnnnnnnnnnnnnnnnnnnnnnnnnnnnnnnnnnnnnnnnnnnnnnnnnnnnnnnnnnnnnnnnnnnnnnnnnnnnnnnnnnnnnnnnnnnnnnnnnnnnnnnnnnnnnnnnnnnnnnnnnnnnnnnnnnnnnnnnnnnnnnnnnnnnnnnnnnnnnnnnnnnnnnnnnnnnnnnnnnnnnnnnnnnnnnnnnnnnnnnnnnnnnnnnnnnnnnnnnnnnnnnnnnnnnnnnnnnnnnnnnnnnnnnnnnnnnnnnnnnnnnnnnnnnnnnnnnnnnnnnnnnnnnnnnnnnnnnnnnnnnnnnnnnnnnnnnnnnnnnnnnnnnnnnnnnnnnnnnnnnnnnnnnnnnnnnnnnnnnnnnnnnnnnnnnnnnnnnnnnnnnnnnnnnnnnnnnnnnnnnnnnnnnnnnnnnnnnnnnnnnnnnnnnnnnnnnnnnnnnnnnnnnnnnnnnnnnnnnnnnnnnnnnnnnnnnnnnnnnnnnnnnnnnnnnnnnnnnnnnnnnnnnnnnnnnnnnnnnnnnnnnnnnnnnnnnnnnnnnnnnnnnnnnnnnnnnnnnnnnnnnnnnnnnnnnnnnnnnnnnnnnnnnnnnnnnnnnnnnnnnnnnnnnnnnnnnnnnnnnnnnnnnnnnnnnnnnnnnnnnnnnnnnnnnnnnnnnnnnnnnnnnnnnnnnnnnnnnnnnnnnnnnnnnnnnnnnnnnnnnnnnnnnnnnnnnnnnnnnnnnnnnnnnnnnnnnnnnnnnnnnnnnnnnnnnnnnnnnnnnnnnnnnnnnnnnnnnnnnnnnnnnnnnnnnnnnnnnnnnnnnnnnnnnnnnnnnnnnnnnnnnnnnnnnnnnnnnnnnnnnnnnnnnnnnnnnnnnnnnnnnnnnnnnnnnnnnnnnnnnnnnnnnnnnnnnnnnnnnnnnnnnnnnnnnnnnnnnnnnnnnnnnnnnnnnnnnnnnnnnnnnnnnnnnnnnnnnnnnnnnnnnnnnnnnnnnnnnnnnnnnnnnnnnnnnnnnnnnnnnnnnnnnnnnnnnnnnnnnnnnnnnnnnnnnnnnnnnnnnnnnnnnnnnnnnnnnnnnnnnnnnnnnnnnnnnnnnnnnnnnnnnnnnnnnnnnnnnnnnnnnnnnnnnnnnnnnnnnnnnnnnnnnnnnnnnnnnnnnnnnnnnnnnnnnnnnnnnnnnnnnnnnnnnnnnnnnnnnnnnnnnnnnnnnnnnnnnnnnnnnnnnnnnnnnnnnnnnnnnnnnnnnnnnnnnnnnnnnnnnnnnnnnnnnnnnnnnnnnnnnnnnnnnnnnnnnnnnnnnnnnnnnnnnnnnnnnnnnnnnnnnnnnnnnnnnnnnnnnnnnnnnnnnnnnnnnnnnnnnnnnnnnnnnnnnnnnnnnnnnnnnnnnnnnnnnnnnnnnnnnnnnnnnnnnnnnnnnnnnnnnnnnnnnnnnnnnnnnnnnnnnnnnnnnnnnnnnnnnnnnnnnnnnnnnnnnnnnnnnnnnnnnnnnnnnnnnnnnnnnnnnnnnnnnnnnnnnnnnnnnnnnnnnnnnnnnnnnnnnnnnnnnnnnnnnnnnnnnnnnnnnnnnnnnnnnnnnnnnnnnnnnnnnnnnnnnnnnnnnnnnnnnnnnnnnnnnnnnnnnnnnnnnnnnnnnnnnnnnnnnnnnnnnnnnnnnnnnnnnnnnnnnnnnnnnnnnnnnnnnnnnnnnnnnnnnnnnnnnnnnnnnnnnnnnnnnnnnnnnnnnnnnnnnnnnnnnnnnnnnnnnnnnnnnnnnnnnnnnnnnnnnnnnnnnnnnnnnnnnnnnnnnnnnnnnnnnnnnnnnnnnnnnnnnnnnnnnnnnnnnnnnnnnnnnnnnnnnnnnnnnnnnnnnnnnnnnnnnnnnnnnnnnnnnnnnnnnnnnnnnnnnnnnnnnnnnnnnnnnnnnnnnnnnnnnnnnnnnnnnnnnnnnnnnnnnnnnnnnnnnnnnnnnnnnnnnnnnnnnnnnnnnnnnnnnnnnnnnnnnnnnnnnnnnnnnnnnnnnnnnnnnnnnnnnnnnnnnnnnnnnnnnnnnnnnnnnnnnnnnnnnnnnnnnnnnnnnnnnnnnnnnnnnnnnnnnnnnnnnnnnnnnnnnnnnnnnnnnnnnnnnnnnnnnnnnnnnnnnnnnnnnnnnnnnnnnnnnnnnnnnnnnnnnnnnnnnnnnnnnnnnnnnnnnnnnnnnnnnnnnnnnnnnnnnnnnnnnnnnnnnnnnnnnnnnnnnnnnnnnnnnnnnnnnnnnnnnnnnnnnnnnnnnnnnnnnnnnnnnnnnnnnnnnnnnnnnnnnnnnnnnnnnnnnnnnnnnnnnnnnnnnnnnnnnnnnnnnnnnnnnnnnnnnnnnnnnnnnnnnnnnnnnnnnnnnnnnnnnnnnnnnnnnnnnnnnnnnnnnnnnnnnnnnnnnnnnnnnnnnnnnnnnnnnnnnnnnnnnnnnnnnnnnnnnnnnnnnnnnnnnnnnnnnnnnnnnnnnnnnnnnnnnnnnnnnnnnnnnnnnnnnnnnnnnnnnnnnnnnnnnnnnnnnnnnnnnnnnnnnnnnnnnnnnnnnnnnnnnnnnnnnnnnnnnnnnnnnnnnnnnnnnnnnnnnnnnnnnnnnnnnnnnnnnnnnnnnnnnnnnnnnnnnnnnnnnnnnnnnnnnnnnnnnnnnnnnnnnnnnnnnnnnnnnnnnnnnnnnnnnnnnnnnnnnnnnnnnnnnnnnnnnnnnnnnnnnnnnnnnnnnnnnnnnnnnnnnnnnnnnnnnnnnnnnnnnnnnnnnnnnnnnnnnnnnnnnnnnnnnnnnnnnnnnnnnnnnnnnnnnnnnnnnnnnnnnnnnnnnnnnnnnnnnnnnnnnnnnnnnnnnnnnnnnnnnnnnnnnnnnnnnnnnnnnnnnnnnnnnnnnnnnnnnnnnnnnnnnnnnnnnnnnnnnnnnnnnnnnnnnnnnnnnnnnnnnnnnnnnnnnnnnnnnnnnnnnnnnnnnnnnnnnnnnnnnnnnnnnnnnnnnnnnnnnnnnnnnnnnnnnnnnnnnnnnnnnnnnnnnnnnnnnnnnnnnnnnnnnnnnnnnnnnnnnnnnnnnnnnnnnnnnnnnnnnnnnnnnnnnnnnnnnnnnnnnnnnnnnnnnnnnnnnnnnnnnnnnnnnnnnnnnnnnnnnnnnnnnnnnnnnnnnnnnnnnnnnnnnnnnnnnnnnnnnnnnnnnnnnnnnnnnnnnnnnnnnnnnnnnnnnnnnnnnnnnnnnnnnnnnnnnnnnnnnnnnnnnnnnnnnnnnnnnnnnnnnnnnnnnnnnnnnnnnnnnnnnnnnnnnnnnnnnnnnnnnnnnnnnnnnnnnnnnnnnnnnnnnnnnnnnnnnnnnnnnnnnnnnnnnnnnnnnnnnnnnnnnnnnnnnnnnnnnnnnnnnnnnnnnnnnnnnnnnnnnnnnnnnnnnnnnnnnnnnnnnnnnnnnnnnnnnnnnnnnnnnnnnnnnnnnnnnnnnnnnnnnnnnnnnnnnnnnnnnnnnnnnnnnnnnnnnnnnnnnnnnnnnnnnnnnnnnnnnnnnnnnnnnnnnnnnnnnnnnnnnnnnnnnnnnnnnnnnnnnnnnnnnnnnnnnnnnnnnnnnnnnnnnnnnnnnnnnnnnnnnnnnnnnnnnnnnnnnnnnnnnnnnnnnnnnnnnnnnnnnnnnnnnnnnnnnnnnnnnnnnnnnnnnnnnnnnnnnnnnnnnnnnnnnnnnnnnnnnnnnnnnnnnnnnnnnnnnnnnnnnnnnnnnnnnnnnnnnnnnnnnnnnnnnnnnnnnnnnnnnnnnnnnnnnnnnnnnnnnnnnnnnnnnnnnnnnnnnnnnnnnnnnnnnnnnnnnnnnnnnnnnnnnnnnnnnnnnnnnnnnnnnnnnnnnnnnnnnnnnnnnnnnnnnnnnnnnnnnnnnnnnnnnnnnnnnnnnnnnnnnnnnnnnnnnnnnnnnnnnnnnnnnnnnnnnnnnnnnnnnnnnnnnnnnnnnnnnnnnnnnnnnnnnnnnnnnnnnnnnnnnnnnnnnnnnnnnnnnnnnnnnnnnnnnnnnnnnnnnnnnnnnnnnnnnnnnnnnnnnnnnnnnnnnnnnnnnnnnnnnnnnnnnnnnnnnnnnnnnnnnnnnnnnnnnnnnnnnnnnnnnnnnnnnnnnnnnnnnnnnnnnnnnnnnnnnnnnnnnnnnnnnnnnnnnnnnnnnnnnnnnnnnnnnnnnnnnnnnnnnnnnnnnnnnnnnnnnnnnnnnnnnnnnnnnnnnnnnnnnnnnnnnnnnnnnnnnnnnnnnnnnnnnnnnnnnnnnnnnnnnnnnnnnnnnnnnnnnnnnnnnnnnnnnnnnnnnnnnnnnnnnnnnnnnnnnnnnnnnnnnnnnnnnnnnnnnnnnnnnnnnnnnnnnnnnnnnnnnnnnnnnnnnnnnnnnnnnnnnnnnnnnnnnnnnnnnnnnnnnnnnnnnnnnnnnnnnnnnnnnnnnnnnnnnnnnnnnnnnnnnnnnnnnnnnnnnnnnnnnnnnnnnnnnnnnnnnnnnnnnnnnnnnnnnnnnnnnnnnnnnnnnnnnnnnnnnnnnnnnnnnnnnnnnnnnnnnnnnnnnnnnnnnnnnnnnnnnnnnnnnnnnnnnnnnnnnnnnnnnnnnnnnnnnnnnnnnnnnnnnnnnnnnnnnnnnnnnnnnnnnnnnnnnnnnnnnnnnnnnnnnnnnnnnnnnnnnnnnnnnnnnnnnnnnnnnnnnnnnnnnnnnnnnnnnnnnnnnnnnnnnnnnnnnnnnnnnnnnnnnnnnnnnnnnnnnnnnnnnnnnnnnnnnnnnnnnnnnnnnnnnnnnnnnnnnnnnnnnnnnnnnnnnnnnnnnnnnnnnnnnnnnnnnnnnnnnnnnnnnnnnnnnnnnnnnnnnnnnnnnnnnnnnnnnnnnnnnnnnnnnnnnnnnnnnnnnnnnnnnnnnnnnnnnnnnnnnnnnnnnnnnnnnnnnnnnnnnnnnnnnnnnnnnnnnnnnnnnnnnnnnnnnnnnnnnnnnnnnnnnnnnnnnnnnnnnnnnnnnnnnnnnnnnnnnnnnnnnnnnnnnnnnnnnnnnnnnnnnnnnnnnnnnnnnnnnnnnnnnnnnnnnnnnnnnnnnnnnnnnnnnnnnnnnnnnnnnnnnnnnnnnnnnnnnnnnnnnnnnnnnnnnnnnnnnnnnnnnnnnnnnnnnnnnnnnnnnnnnnnnnnnnnnnnnnnnnnnnnnnnnnnnnnnnnnnnnnnnnnnnnnnnnnnnnnnnnnnnnnnnnnnnnnnnnnnnnnnnnnnnnnnnnnnnnnnnnnnnnnnnnnnnnnnnnnnnnnnnnnnnnnnnnnnnnnnnnnnnnnnnnnnnnnnnnnnnnnnnnnnnnnnnnnnnnnnnnnnnnnnnnnnnnnnnnnnnnnnnnnnnnnnnnnnnnnnnnnnnnnnnnnnnnnnnnnnnnnnnnnnnnnnnnnnnnnnnnnnnnnnnnnnnnnnnnnnnnnnnnnnnnnnnnnnnnnnnnnnnnnnnnnnnnnnnnnnnnnnnnnnnnnnnnnnnnnnnnnnnnnnnnnnnnnnnnnnnnnnnnnnnnnnnnnnnnnnnnnnnnnnnnnnnnnnnnnnnnnnnnnnnnnnnnnnnnnnnnnnnnnnnnnnnnnnnnnnnnnnnnnnnnnnnnnnnnnnnnnnnnnnnnnnnnnnnnnnnnnnnnnnnnnnnnnnnnnnnnnnnnnnnnnnnnnnnnnnnnnnnnnnnnnnnnnnnnnnnnnnnnnnnnnnnnnnnnnnnnnnnnnnnnnnnnnnnnnnnnnnnnnnnnnnnnnnnnnnnnnnnnnnnnnnnnnnnnnnnnnnnnnnnnnnnnnnnnnnnnnnnnnnnnnnnnnnnnnnnnnnnnnnnnnnnnnnnnnnnnnnnnnnnnnnnnnnnnnnnnnnnnnnnnnnnnnnnnnnnnnnnnnnnnnnnnnnnnnnnnnnnnnnnnnnnnnnnnnnnnnnnnnnnnnnnnnnnnnnnnnnnnnnnnnnnnnnnnnnnnnnnnnnnnnnnnnnnnnnnnnnnnnnnnnnnnnnnnnnnnnnnnnnnnnnnnnnnnnnnnnnnnnnnnnnnnnnnnnnnnnnnnnnnnnnnnnnnnnnnnnnnnnnnnnnnnnnnnnnnnnnnnnnnnnnnnnnnnnnnnnnnnnnnnnnnnnnnnnnnnnnnnnnnnnnnnnnnnnnnnnnnnnnnnnnnnnnnnnnnnnnnnnnnnnnnnnnnnnnnnnnnnnnnnnnnnnnnnnnnnnnnnnnnnnnnnnnnnnnnnnnnnnnnnnnnnnnnnnnnnnnnnnnnnnnnnnnnnnnnnnnnnnnnnnnnnnnnnnnnnnnnnnnnnnnnnnnnnnnnnnnnnnnnnnnnnnnnnnnnnnnnnnnnnnnnnnnnnnnnnnnnnnnnnnnnnnnnnnnnnnnnnnnnnnnnnnnnnnnnnnnnnnnnnnnnnnnnnnnnnnnnnnnnnnnnnnnnnnnnnnnnnnnnnnnnnnnnnnnnnnnnnnnnnnnnnnnnnnnnnnnnnnnnnnnnnnnnnnnnnnnnnnnnnnnnnnnnnnnnnnnnnnnnnnnnnnnnnnnnnnnnnnnnnnnnnnnnnnnnnnnnnnnnnnnnnnnnnnnnnnnnnnnnnnnnnnnnnnnnnnnnnnnnnnnnnnnnnnnnnnnnnnnnnnnnnnnnnnnnnnnnnnnnnnnnnnnnnnnnnnnnnnnnnnnnnnnnnnnnnnnnnnnnnnnnnnnnnnnnnnnnnnnnnnnnnnnnnnnnnnnnnnnnnnnnnnnnnnnnnnnnnnnnnnnnnnnnnnnnnnnnnnnnnnnnnnnnnnnnnnnnnnnnnnnnnnnnnnnnnnnnnnnnnnnnnnnnnnnnnnnnnnnnnnnnnnnnnnnnnnnnnnnnnnnnnnnnnnnnnnnnnnnnnnnnnnnnnnnnnnnnnnnnnnnnnnnnnnnnnnnnnnnnnnnnnnnnnnnnnnnnnnnnnnnnnnnnnnnnnnnnnnnnnnnnnnnnnnnnnnnnnnnnnnnnnnnnnnnnnnnnnnnnnnnnnnnnnnnnnnnnnnnnnnnnnnnnnnnnnnnnnnnnnnnnnnnnnnnnnnnnnnnnnnnnnnnnnnnnnnnnnnnnnnnnnnnnnnnnnnnnnnnnnnnnnnnnnnnnnnnnnnnnnnnnnnnnnnnnnnnnnnnnnnnnnnnnnnnnnnnnnnnnnnnnnnnnnnnnnnnnnnnnnnnnnnnnnnnnnnnnnnnnnnnnnnnnnnnnnnnnnnnnnnnnnnnnnnnnnnnnnnnnnnnnnnnnnnnnnnnnnnnnnnnnnnnnnnnnnnnnnnnnnnnnnnnnnnnnnnnnnnnnnnnnnnnnnnnnnnnnnnnnnnnnnnnnnnnnnnnnnnnnnnnnnnnnnnnnnnnnnnnnnnnnnnnnnnnnnnnnnnnnnnnnnnnnnnnnnnnnnnnnnnnnnnnnnnnnnnnnnnnnnnnnnnnnnnnnnnnnnnnnnnnnnnnnnnnnnnnnnnnnnnnnnnnnnnnnnnnnnnnnnnnnnnnnnnnnnnnnnnnnnnnnnnnnnnnnnnnnnnnnnnnnnnnnnnnnnnnnnnnnnnnnnnnnnnnnnnnnnnnnnnnnnnnnnnnnnnnnnnnnnnnnnnnnnnnnnnnnnnnnnnnnnnnnnnnnnnnnnnnnnnnnnnnnnnnnnnnnnnnnnnnnnnnnnnnnnnnnnnnnnnnnnnnnnnnnnnnnnnnnnnnnnnnnnnnnnnnnnnnnnnnnnnnnnnnnnnnnnnnnnnnnnnnnnnnnnnnnnnnnnnnnnnnnnnnnnnnnnnnnnnnnnnnnnnnnnnnnnnnnnnnnnnnnnnnnnnnnnnnnnnnnnnnnnnnnnnnnnnnnnnnnnnnnnnnnnnnnnnnnnnnnnnnnnnnnnnnnnnnnnnnnnnnnnnnnnnnnnnnnnnnnnnnnnnnnnnnnnnnnnnnnnnnnnnnnnnnnnnnnnnnnnnnnnnnnnnnnnnnnnnnnnnnnnnnnnnnnnnnnnnnnnnnnnnnnnnnnnnnnnnnnnnnnnnnnnnnnnnnnnnnnnnnnnnnnnnnnnnnnnnnnnnnnnnnnnnnnnnnnnnnnnnnnnnnnnnnnnnnnnnnnnnnnnnnnnnnnnnnnnnnnnnnnnnnnnnnnnnnnnnnnnnnnnnnnnnnnnnnnnnnnnnnnnnnnnnnnnnnnnnnnnnnnnnnnnnnnnnnnnnnnnnnnnnnnnnnnnnnnnnnnnnnnnnnnnnnnnnnnnnnnnnnnnnnnnnnnnnnnnnnnnnnnnnnnnnnnnnnnnnnnnnnnnnnnnnnnnnnnnnnnnnnnnnnnnnnnnnnnnnnnnnnnnnnnnnnnnnnnnnnnnnnnnnnnnnnnnnnnnnnnnnnnnnnnnnnnnnnnnnnnnnnnnnnnnnnnnnnnnnnnnnnnnnnnnnnnnnnnnnnnnnnnnnnnnnnnnnnnnnnnnnnnnnnnnnnnnnnnnnnnnnnnnnnnnnnnnnnnnnnnnnnnnnnnnnnnnnnnnnnnnnnnnnnnnnnnnnnnnnnnnnnnnnnnnnnnnnnnnnnnnnnnnnnnnnnnnnnnnnnnnnnnnnnnnnnnnnnnnnnnnnnnnnnnnnnnnnnnnnnnnnnnnnnnnnnnnnnnnnnnnnnnnnnnnnnnnnnnnnnnnnnnnnnnnnnnnnnnnnnnnnnnnnnnnnnnnnnnnnnnnnnnnnnnnnnnnnnnnnnnnnnnnnnnnnnnnnnnnnnnnnnnnnnnnnnnnnnnnnnnnnnnnnnnnnnnnnnnnnnnnnnnnnnnnnnnnnnnnnnnnnnnnnnnnnnnnnnnnnnnnnnnnnnnnnnnnnnnnnnnnnnnnnnnnnnnnnnnnnnnnnnnnnnnnnnnnnnnnnnnnnnnnnnnnnnnnnnnnnnnnnnnnnnnnnnnnnnnnnnnnnnnnnnnnnnnnnnnnnnnnnnnnnnnnnnnnnnnnnnnnnnnnnnnnnnnnnnnnnnnnnnnnnnnnnnnnnnnnnnnnnnnnnnnnnnnnnnnnnnnnnnnnnnnnnnnnnnnnnnnnnnnnnnnnnnnnnnnnnnnnnnnnnnnnnnnnnnnnnnnnnnnnnnnnnnnnnnnnnnnnnnnnnnnnnnnnnnnnnnnnnnnnnnnnnnnnnnnnnnnnnnnnnnnnnnnnnnnnnnnnnnnnnnnnnnnnnnnnnnnnnnnnnnnnnnnnnnnnnnnnnnnnnnnnnnnnnnnnnnnnnnnnnnnnnnnnnnnnnnnnnnnnnnnnnnnnnnnnnnnnnnnnnnnnnnnnnnnnnnnnnnnnnnnnnnnnnnnnnnnnnnnnnnnnnnnnnnnnnnnnnnnnnnnnnnnnnnnnnnnnnnnnnnnnnnnnnnnnnnnnnnnnnnnnnnnnnnnnnnnnnnnnnnnnnnnnnnnnnnnnnnnnnnnnnnnnnnnnnnnnnnnnnnnnnnnnnnnnnnnnnnnnnnnnnnnnnnnnnnnnnnnnnnnnnnnnnnnnnnnnnnnnnnnnnnnnnnnnnnnnnnnnnnnnnnnnnnnnnnnnnnnnnnnnnnnnnnnnnnnnnnnnnnnnnnnnnnnnnnnnnnnnnnnnnnnnnnnnnnnnnnnnnnnnnnnnnnnnnnnnnnnnnnnnnnnnnnnnnnnnnnnnnnnnnnnnnnnnnnnnnnnnnnnnnnnnnnnnnnnnnnnnnnnnnnnnnnnnnnnnnnnnnnnnnnnnnnnnnnnnnnnnnnnnnnnnnnnnnnnnnnnnnnnnnnnnnnnnnnnnnnnnnnnnnnnnnnnnnnnnnnnnnnnnnnnnnnnnnnnnnnnnnnnnnnnnnnnnnnnnnnnnnnnnnnnnnnnnnnnnnnnnnnnnnnnnnnnnnnnnnnnnnnnnnnnnnnnnnnnnnnnnnnnnnnnnnnnnnnnnnnnnnnnnnnnnnnnnnnnnnnnnnnnnnnnnnnnnnnnnnnnnnnnnnnnnnnnnnnnnnnnnnnnnnnnnnnnnnnnnnnnnnnnnnnnnnnnnnnnnnnnnnnnnnnnnnnnnnnnnnnnnnnnnnnnnnnnnnnnnnnnnnnnnnnnnnnnnnnnnnnnnnnnnnnnnnnnnnnnnnnnnnnnnnnnnnnnnnnnnnnnnnnnnnnnnnnnnnnnnnnnnnnnnnnnnnnnnnnnnnnnnnnnnnnnnnnnnnnnnnnnnnnnnnnnnnnnnnnnnnnnnnnnnnnnnnnnnnnnnnnnnnnnnnnnnnnnnnnnnnnnnnnnnnnnnnnnnnnnnnnnnnnnnnnnnnnnnnnnnnnnnnnnnnnnnnnnnnnnnnnnnnnnnnnnnnnnnnnnnnnnnnnnnnnnnnnnnnnnnnnnnnnnnnnnnnnnnnnnnnnnnnnnnnnnnnnnnnnnnnnnnnnnnnnnnnnnnnnnnnnnnnnnnnnnnnnnnnnnnnnnnnnnnnnnnnnnnnnnnnnnnnnnnnnnnnnnnnnnnnnnnnnnnnnnnnnnnnnnnnnnnnnnnnnnnnnnnnnnnnnnnnnnnnnnnnnnnnnnnnnnnnnnnnnnnnnnnnnnnnnnnnnnnnnnnnnnnnnnnnnnnnnnnnnnnnnnnnnnnnnnnnnnnnnnnnnnnnnnnnnnnnnnnnnnnnnnnnnnnnnnnnnnnnnnnnnnnnnnnnnnnnnnnnnnnnnnnnnnnnnnnnnnnnnnnnnnnnnnnnnnnnnnnnnnnnnnnnnnnnnnnnnnnnnnnnnnnnnnnnnnnnnnnnnnnnnnnnnnnnnnnnnnnnnnnnnnnnnnnnnnnnnnnnnnnnnnnnnnnnnnnnnnnnnnnnnnnnnnnnnnnnnnnnnnnnnnnnnnnnnnnnnnnnnnnnnnnnnnnnnnnnnnnnnnnnnnnnnnnnnnnnnnnnnnnnnnnnnnnnnnnnnnnnnnnnnnnnnnnnnnnnnnnnnnnnnnnnnnnnnnnnnnnnnnnnnnnnnnnnnnnnnnnnnnnnnnnnnnnnnnnnnnnnnnnnnnnnnnnnnnnnnnnnnnnnnnnnnnnnnnnnnnnnnnnnnnnnnnnnnnnnnnnnnnnnnnnnnnnnnnnnnnnnnnnnnnnnnnnnnnnnnnnnnnnnnnnnnnnnnnnnnnnnnnnnnnnnnnnnnnnnnnnnnnnnnnnnnnnnnnnnnnnnnnnnnnnnnnnnnnnnnnnnnnnnnnnnnnnnnnnnnnnnnnnnnnnnnnnnnnnnnnnnnnnnnnnnnnnnnnnnnnnnnnnnnnnnnnnnnnnnnnnnnnnnnnnnnnnnnnnnnnnnnnnnnnnnnnnnnnnnnnnnnnnnnnnnnnnnnnnnnnnnnnnnnnnnnnnnnnnnnnnnnnnnnnnnnnnnnnnnnnnnnnnnnnnnnnnnnnnnnnnnnnnnnnnnnnnnnnnnnnnnnnnnnnnnnnnnnnnnnnnnnnnnnnnnnnnnnnnnnnnnnnnnnnnnnnnnnnnnnnnnnnnnnnnnnnnnnnnnnnnnnnnnnnnnnnnnnnnnnnnnnnnnnnnnnnnnnnnnnnnnnnnnnnnnnnnnnnnnnnnnnnnnnnnnnnnnnnnnnnnnnnnnnnnnnnnnnnnnnnnnnnnnnnnnnnnnnnnnnnnnnnnnnnnnnnnnnnnnnnnnnnnnnnnnnnnnnnnnnnnnnnnnnnnnnnnnnnnnnnnnnnnnnnnnnnnnnnnnnnnnnnnnnnnnnnnnnnnnnnnnnnnnnnnnnnnnnnnnnnnnnnnnnnnnnnnnnnnnnnnnnnnnnnnnnnnnnnnnnnnnnnnnnnnnnnnnnnnnnnnnnnnnnnnnnnnnnnnnnnnnnnnnnnnnnnnnnnnnnnnnnnnnnnnnnnnnnnnnnnnnnnnnnnnnnnnnnnnnnnnnnnnnnnnnnnnnnnnnnnnnnnnnnnnnnnnnnnnnnnnnnnnnnnnnnnnnnnnnnnnnnnnnnnnnnnnnnnnnnnnnnnnnnnnnnnnnnnnnnnnnnnnnnnnnnnnnnnnnnnnnnnnnnnnnnnnnnnnnnnnnnnnnnnnnnnnnnnnnnnnnnnnnnnnnnnnnnnnnnnnnnnnnnnnnnnnnnnnnnnnnnnnnnnnnnnnnnnnnnnnnnnnnnnnnnnnnnnnnnnnnnnnnnnnnnnnnnnnnnnnnnnnnnnnnnnnnnnnnnnnnnnnnnnnnnnnnnnnnnnnnnnnnnnnnnnnnnnnnnnnnnnnnnnnnnnnnnnnnnnnnnnnnnnnnnnnnnnnnnnnnnnnnnnnnnnnnnnnnnnnnnnnnnnnnnnnnnnnnnnnnnnnnnnnnnnnnnnnnnnnnnnnnnnnnnnnnnnnnnnnnnnnnnnnnnnnnnnnnnnnnnnnnnnnnnnnnnnnnnnnnnnnnnnnnnnnnnnnnnnnnnnnnnnnnnnnnnnnnnnnnnnnnnnnnnnnnnnnnnnnnnnnnnnnnnnnnnnnnnnnnnnnnnnnnnnnnnnnnnnnnnnnnnnnnnnnnnnnnnnnnnnnnnnnnnnnnnnnnnnnnnnnnnnnnnnnnnnnnnnnnnnnnnnnnnnnnnnnnnnnnnnnnnnnnnnnnnnnnnnnnnnnnnnnnnnnnnnnnnnnnnnnnnnnnnnnnnnnnnnnnnnnnnnnnnnnnnnnnnnnnnnnnnnnnnnnnnnnnnnnnnnnnnnnnnnnnnnnnnnnnnnnnnnnnnnnnnnnnnnnnnnnnnnnnnnnnnnnnnnnnnnnnnnnnnnnnnnnnnnnnnnnnnnnnnnnnnnnnnnnnnnnnnnnnnnnnnnnnnnnnnnnnnnnnnnnnnnnnnnnnnnnnnnnnnnnnnnnnnnnnnnnnnnnnnnnnnnnnnnnnnnnnnnnnnnnnnnnnnnnnnnnnnnnnnnnnnnnnnnnnnnnnnnnnnnnnnnnnnnnnnnnnnnnnnnnnnnnnnnnnnnnnnnnnnnnnnnnnnnnnnnnnnnnnnnnnnnnnnnnnnnnnnnnnnnnnnnnnnnnnnnnnnnnnnnnnnnnnnnnnnnnnnnnnnnnnnnnnnnnnnnnnnnnnnnnnnnnnnnnnnnnnnnnnnnnnnnnnnnnnnnnnnnnnnnnnnnnnnnnnnnnnnnnnnnnnnnnnnnnnnnnnnnnnnnnnnnnnnnnnnnnnnnnnnnnnnnnnnnnnnnnnnnnnnnnnnnnnnnnnnnnnnnnnnnnnnnnnnnnnnnnnnnnnnnnnnnnnnnnnnnnnnnnnnnnnnnnnnnnnnnnnnnnnnnnnnnnnnnnnnnnnnnnnnnnnnnnnnnnnnnnnnnnnnnnnnnnnnnnnnnnnnnnnnnnnnnnnnnnnnnnnnnnnnnnnnnnnnnnnnnnnnnnnnnnnnnnnnnnnnnnnnnnnnnnnnnnnnnnnnnnnnnnnnnnnnnnnnnnnnnnnnnnnnnnnnnnnnnnnnnnnnnnnnnnnnnnnnnnnnnnnnnnnnnnnnnnnnnnnnnnnnnnnnnnnnnnnnnnnnnnnnnnnnnnnnnnnnnnnnnnnnnnnnnnnnnnnnnnnnnnnnnnnnnnnnnnnnnnnnnnnnnnnnnnnnnnnnnnnnnnnnnnnnnnnnnnnnnnnnnnnnnnnnnnnnnnnnnnnnnnnnnnnnnnnnnnnnnnnnnnnnnnnnnnnnnnnnnnnnnnnnnnnnnnnnnnnnnnnnnnnnnnnnnnnnnnnnnnnnnnnnnnnnnnnnnnnnnnnnnnnnnnnnnnnnnnnnnnnnnnnnnnnnnnnnnnnnnnnnnnnnnnnnnnnnnnnnnnnnnnnnnnnnnnnnnnnnnnnnnnnnnnnnnnnnnnnnnnnnnnnnnnnnnnnnnnnnnnnnnnnnnnnnnnnnnnnnnnnnnnnnnnnnnnnnnnnnnnnnnnnnnnnnnnnnnnnnnnnnnnnnnnnnnnnnnnnnnnnnnnnnnnnnnnnnnnnnnnnnnnnnnnnnnnnnnnnnnnnnnnnnnnnnnnnnnnnnnnnnnnnnnnnnnnnnnnnnnnnnnnnnnnnnnnnnnnnnnnnnnnnnnnnnnnnnnnnnnnnnnnnnnnnnnnnnnnnnnnnnnnnnnnnnnnnnnnnnnnnnnnnnnnnnnnnnnnnnnnnnnnnnnnnnnnnnnnnnnnnnnnnnnnnnnnnnnnnnnnnnnnnnnnnnnnnnnnnnnnnnnnnnnnnnnnnnnnnnnnnnnnnnnnnnnnnnnnnnnnnnnnnnnnnnnnnnnnnnnnnnnnnnnnnnnnnnnnnnnnnnnnnnnnnnnnnnnnnnnnnnnnnnnnnnnnnnnnnnnnnnnnnnnnnnnnnnnnnnnnnnnnnnnnnnnnnnnnnnnnnnnnnnnnnnnnnnnnnnnnnnnnnnnnnnnnnnnnnnnnnnnnnnnnnnnnnnnnnnnnnnnnnnnnnnnnnnnnnnnnnnnnnnnnnnnnnnnnnnnnnnnnnnnnnnnnnnnnnnnnnnnnnnnnnnnnnnnnnnnnnnnnnnnnnnnnnnnnnnnnnnnnnnnnnnnnnnnnnnnnnnnnnnnnnnnnnnnnnnnnnnnnnnnnnnnnnnnnnnnnnnnnnnnnnnnnnnnnnnnnnnnnnnnnnnnnnnnnnnnnnnnnnnnnnnnnnnnnnnnnnnnnnnnnnnnnnnnnnnnnnnnnnnnnnnnnnnnnnnnnnnnnnnnnnnnnnnnnnnnnnnnnnnnnnnnnnnnnnnnnnnnnnnnnnnnnnnnnnnnnnnnnnnnnnnnnnnnnnnnnnnnnnnnnnnnnnnnnnnnnnnnnnnnnnnnnnnnnnnnnnnnnnnnnnnnnnnnnnnnnnnnnnnnnnnnnnnnnnnnnnnnnnnnnnnnnnnnnnnnnnnnnnnnnnnnnnnnnnnnnnnnnnnnnnnnnnnnnnnnnnnnnnnnnnnnnnnnnnnnnnnnnnnnnnnnnnnnnnnnnnnnnnnnnnnnnnnnnnnnnnnnnnnnnnnnnnnnnnnnnnnnnnnnnnnnnnnnnnnnnnnnnnnnnnnnnnnnnnnnnnnnnnnnnnnnnnnnnnnnnnnnnnnnnnnnnnnnnnnnnnnnnnnnnnnnnnnnnnnnnnnnnnnnnnnnnnnnnnnnnnnnnnnnnnnnnnnnnnnnnnnnnnnnnnnnnnnnnnnnnnnnnnnnnnnnnnnnnnnnnnnnnnnnnnnnnnnnnnnnnnnnnnnnnnnnnnnnnnnnnnnnnnnnnnnnnnnnnnnnnnnnnnnnnnnnnnnnnnnnnnnnnnnnnnnnnnnnnnnnnnnnnnnnnnnnnnnnnnnnnnnnnnnnnnnnnnnnnnnnnnnnnnnnnnnnnnnnnnnnnnnnnnnnnnnnnnnnnnnnnnnnnnnnnnnnnnnnnnnnnnnnnnnnnnnnnnnnnnnnnnnnnnnnnnnnnnnnnnnnnnnnnnnnnnnnnnnnnnnnnnnnnnnnnnnnnnnnnnnnnnnnnnnnnnnnnnnnnnnnnnnnnnnnnnnnnnnnnnnnnnnnnnnnnnnnnnnnnnnnnnnnnnnnnnnnnnnnnnnnnnnnnnnnnnnnnnnnnnnnnnnnnnnnnnnnnnnnnnnnnnnnnnnnnnnnnnnnnnnnnnnnnnnnnnnnnnnnnnnnnnnnnnnnnnnnnnnnnnnnnnnnnnnnnnnnnnnnnnnnnnnnnnnnnnnnnnnnnnnnnnnnnnnnnnnnnnnnnnnnnnnnnnnnnnnnnnnnnnnnnnnnnnnnnnnnnnnnnnnnnnnnnnnnnnnnnnnnnnnnnnnnnnnnnnnnnnnnnnnnnnnnnnnnnnnnnnnnnnnnnnnnnnnnnnnnnnnnnnnnnnnnnnnnnnnnnnnnnnnnnnnnnnnnnnnnnnnnnnnnnnnnnnnnnnnnnnnnnnnnnnnnnnnnnnnnnnnnnnnnnnnnnnnnnnnnnnnnnnnnnnnnnnnnnnnnnnnnnnnnnnnnnnnnnnnnnnnnnnnnnnnnnnnnnnnnnnnnnnnnnnnnnnnnnnnnnnnnnnnnnnnnnnnnnnnnnnnnnnnnnnnnnnnnnnnnnnnnnnnnnnnnnnnnnnnnnnnnnnnnnnnnnnnnnnnnnnnnnnnnnnnnnnnnnnnnnnnnnnnnnnnnnnnnnnnnnnnnnnnnnnnnnnnnnnnnnnnnnnnnnnnnnnnnnnnnnnnnnnnnnnnnnnnnnnnnnnnnnnnnnnnnnnnnnnnnnnnnnnnnnnnnnnnnnnnnnnnnnnnnnnnnnnnnnnnnnnnnnnnnnnnnnnnnnnnnnnnnnnnnnnnnnnnnnnnnnnnnnnnnnnnnnnnnnnnnnnnnnnnnnnnnnnnnnnnnnnnnnnnnnnnnnnnnnnnnnnnnnnnnnnnnnnnnnnnnnnnnnnnnnnnnnnnnnnnnnnnnnnnnnnnnnnnnnnnnnnnnnnnnnnnnnnnnnnnnnnnnnnnnnnnnnnnnnnnnnnnnnnnnnnnnnnnnnnnnnnnnnnnnnnnnnnnnnnnnnnnnnnnnnnnnnnnnnnnnnnnnnnnnnnnnnnnnnnnnnnnnnnnnnnnnnnnnnnnnnnnnnnnnnnnnnnnnnnnnnnnnnnnnnnnnnnnnnnnnnnnnnnnnnnnnnnnnnnnnnnnnnnnnnnnnnnnnnnnnnnnnnnnnnnnnnnnnnnnnnnnnnnnnnnnnnnnnnnnnnnnnnnnnnnnnnnnnnnnnnnnnnnnnnnnnnnnnnnnnnnnnnnnnnnnnnnnnnnnnnnnnnnnnnnnnnnnnnnnnnnnnnnnnnnnnnnnnnnnnnnnnnnnnnnnnnnnnnnnnnnnnnnnnnnnnnnnnnnnnnnnnnnnnnnnnnnnnnnnnnnnnnnnnnnnnnnnnnnnnnnnnnnnnnnnnnnnnnnnnnnnnnnnnnnnnnnnnnnnnnnnnnnnnnnnnnnnnnnnnnnnnnnnnnnnnnnnnnnnnnnnnnnnnnnnnnnnnnnnnnnnnnnnnnnnnnnnnnnnnnnnnnnnnnnnnnnnnnnnnnnnnnnnnnnnnnnnnnnnnnnnnnnnnnnnnnnnnnnnnnnnnnnnnnnnnnnnnnnnnnnnnnnnnnnnnnnnnnnnnnnnnnnnnnnnnnnnnnnnnnnnnnnnnnnnnnnnnnnnnnnnnnnnnnnnnnnnnnnnnnnnnnnnnnnnnnnnnnnnnnnnnnnnnnnnnnnnnnnnnnnnnnnnnnnnnnnnnnnnnnnnnnnnnnnnnnnnnnnnnnnnnnnnnnnnnnnnnnnnnnnnnnnnnnnnnnnnnnnnnnnnnnnnnnnnnnnnnnnnnnnnnnnnnnnnnnnnnnnnnnnnnnnnnnnnnnnnnnnnnnnnnnnnnnnnnnnnnnnnnnnnnnnnnnnnnnnnnnnnnnnnnnnnnnnnnnnnnnnnnnnnnnnnnnnnnnnnnnnnnnnnnnnnnnnnnnnnnnnnnnnnnnnnnnnnnnnnnnnnnnnnnnnnnnnnnnnnnnnnnnnnnnnnnnnnnnnnnnnnnnnnnnnnnnnnnnnnnnnnnnnnnnnnnnnnnnnnnnnnnnnnnnnnnnnnnnnnnnnnnnnnnnnnnnnnnnnnnnnnnnnnnnnnnnnnnnnnnnnnnnnnnnnnnnnnnnnnnnnnnnnnnnnnnnnnnnnnnnnnnnnnnnnnnnnnnnnnnnnnnnnnnnnnnnnnnnnnnnnnnnnnnnnnnnnnnnnnnnnnnnnnnnnnnnnnnnnnnnnnnnnnnnnnnnnnnnnnnnnnnnnnnnnnnnnnnnnnnnnnnnnnnnnnnnnnnnnnnnnnnnnnnnnnnnnnnnnnnnnnnnnnnnnnnnnnnnnnnnnnnnnnnnnnnnnnnnnnnnnnnnnnnnnnnnnnnnnnnnnnnnnnnnnnnnnnnnnnnnnnnnnnnnnnnnnnnnnnnnnnnnnnnnnnnnnnnnnnnnnnnnnnnnnnnnnnnnnnnnnnnnnnnnnnnnnnnnnnnnnnnnnnnnnnnnnnnnnnnnnnnnnnnnnnnnnnnnnnnnnnnnnnnnnnnnnnnnnnnnnnnnnnnnnnnnnnnnnnnnnnnnnnnnnnnnnnnnnnnnnnnnnnnnnnnnnnnnnnnnnnnnnnnnnnnnnnnnnnnnnnnnnnnnnnnnnnnnnnnnnnnnnnnnnnnnnnnnnnnnnnnnnnnnnnnnnnnnnnnnnnnnnnnnnnnnnnnnnnnnnnnnnnnnnnnnnnnnnnnnnnnnnnnnnnnnnnnnnnnnnnnnnnnnnnnnnnnnnnnnnnnnnnnnnnnnnnnnnnnnnnnnnnnnnnnnnnnnnnnnnnnnnnnnnnnnnnnnnnnnnnnnnnnnnnnnnnnnnnnnnnnnnnnnnnnnnnnnnnnnnnnnnnnnnnnnnnnnnnnnnnnnnnnnnnnnnnnnnnnnnnnnnnnnnnnnnnnnnnnnnnnnnnnnnnnnnnnnnnnnnnnnnnnnnnnnnnnnnnnnnnnnnnnnnnnnnnnnnnnnnnnnnnnnnnnnnnnnnnnnnnnnnnnnnnnnnnnnnnnnnnnnnnnnnnnnnnnnnnnnnnnnnnnnnnnnnnnnnnnnnnnnnnnnnnnnnnnnnnnnnnnnnnnnnnnnnnnnnnnnnnnnnnnnnnnnnnnnnnnnnnnnnnnnnnnnnnnnnnnnnnnnnnnnnnnnnnnnnnnnnnnnnnnnnnnnnnnnnnnnnnnnnnnnnnnnnnnnnnnnnnnnnnnnnnnnnnnnnnnnnnnnnnnnnnnnnnnnnnnnnnnnnnnnnnnnnnnnnnnnnnnnnnnnnnnnnnnnnnnnnnnnnnnnnnnnnnnnnnnnnnnnnnnnnnnnnnnnnnnnnnnnnnnnnnnnnnnnnnnnnnnnnnnnnnnnnnnnnnnnnnnnnnnnnnnnnnnnnnnnnnnnnnnnnnnnnnnnnnnnnnnnnnnnnnnnnnnnnnnnnnnnnnnnnnnnnnnnnnnnnnnnnnnnnnnnnnnnnnnnnnnnnnnnnnnnnnnnnnnnnnnnnnnnnnnnnnnnnnnnnnnnnnnnnnnnnnnnnnnnnnnnnnnnnnnnnnnnnnnnnnnnnnnnnnnnnnnnnnnnnnnnnnnnnnnnnnnnnnnnnnnnnnnnnnnnnnnnnnnnnnnnnnnnnnnnnnnnnnnnnnnnnnnnnnnnnnnnnnnnnnnnnnnnnnnnnnnnnnnnnnnnnnnnnnnnnnnnnnnnnnnnnnnnnnnnnnnnnnnnnnnnnnnnnnnnnnnnnnnnnnnnnnnnnnnnnnnnnnnnnnnnnnnnnnnnnnnnnnnnnnnnnnnnnnnnnnnnnnnnnnnnnnnnnnnnnnnnnnnnnnnnnnnnnnnnnnnnnnnnnnnnnnnnnnnnnnnnnnnnnnnnnnnnnnnnnnnnnnnnnnnnnnnnnnnnnnnnnnnnnnnnnnnnnnnnnnnnnnnnnnnnnnnnnnnnnnnnnnnnnnnnnnnnnnnnnnnnnnnnnnnnnnnnnnnnnnnnnnnnnnnnnnnnnnnnnnnnnnnnnnnnnnnnnnnnnnnnnnnnnnnnnnnnnnnnnnnnnnnnnnnnnnnnnnnnnnnnnnnnnnnnnnnnnnnnnnnnnnnnnnnnnnnnnnnnnnnnnnnnnnnnnnnnnnnnnnnnnnnnnnnnnnnnnnnnnnnnnnnnnnnnnnnnnnnnnnnnnnnnnnnnnnnnnnnnnnnnnnnnnnnnnnnnnnnnnnnnnnnnnnnnnnnnnnnnnnnnnnnnnnnnnnnnnnnnnnnnnnnnnnnnnnnnnnnnnnnnnnnnnnnnnnnnnnnnnnnnnnnnnnnnnnnnnnnnnnnnnnnnnnnnnnnnnnnnnnnnnnnnnnnnnnnnnnnnnnnnnnnnnnnnnnnnnnnnnnnnnnnnnnnnnnnnnnnnnnnnnnnnnnnnnnnnnnnnnnnnnnnnnnnnnnnnnnnnnnnnnnnnnnnnnnnnnnnnnnnnnnnnnnnnnnnnnnnnnnnnnnnnnnnnnnnnnnnnnnnnnnnnnnnnnnnnnnnnnnnnnnnnnnnnnnnnnnnnnnnnnnnnnnnnnnnnnnnnnnnnnnnnnnnnnnnnnnnnnnnnnnnnnnnnnnnnnnnnnnnnnnnnnnnnnnnnnnnnnnnnnnnnnnnnnnnnnnnnnnnnnnnnnnnnnnnnnnnnnnnnnnnnnnnnnnnnnnnnnnnnnnnnnnnnnnnnnnnnnnnnnnnnnnnnnnnnnnnnnnnnnnnnnnnnnnnnnnnnnnnnnnnnnnnnnnnnnnnnnnnnnnnnnnnnnnnnnnnnnnnnnnnnnnnnnnnnnnnnnnnnnnnnnnnnnnnnnnnnnnnnnnnnnnnnnnnnnnnnnnnnnnnnnnnnnnnnnnnnnnnnnnnnnnnnnnnnnnnnnnnnnnnnnnnnnnnnnnnnnnnnnnnnnnnnnnnnnnnnnnnnnnnnnnnnnnnnnnnnnnnnnnnnnnnnnnnnnnnnnnnnnnnnnnnnnnnnnnnnnnnnnnnnnnnnnnnnnnnnnnnnnnnnnnnnnnnnnnnnnnnnnnnnnnnnnnnnnnnnnnnnnnnnnnnnnnnnnnnnnnnnnnnnnnnnnnnnnnnnnnnnnnnnnnnnnnnnnnnnnnnnnnnnnnnnnnnnnnnnnnnnnnnnnnnnnnnnnnnnnnnnnnnnnnnnnnnnnnnnnnnnnnnnnnnnnnnnnnnnnnnnnnnnnnnnnnnnnnnnnnnnnnnnnnnnnnnnnnnnnnnnnnnnnnnnnnnnnnnnnnnnnnnnnnnnnnnnnnnnnnnnnnnnnnnnnnnnnnnnnnnnnnnnnnnnnnnnnnnnnnnnnnnnnnnnnnnnnnnnnnnnnnnnnnnnnnnnnnnnnnnnnnnnnnnnnnnnnnnnnnnnnnnnnnnnnnnnnnnnnnnnnnnnnnnnnnnnnnnnnnnnnnnnnnnnnnnnnnnnnnnnnnnnnnnnnnnnnnnnnnnnnnnnnnnnnnnnnnnnnnnnnnnnnnnnnnnnnnnnnnnnnnnnnnnnnnnnnnnnnnnnnnnnnnnnnnnnnnnnnnnnnnnnnnnnnnnnnnnnnnnnnnnnnnnnnnnnnnnnnnnnnnnnnnnnnnnnnnnnnnnnnnnnnnnnnnnnnnnnnnnnnnnnnnnnnnnnnnnnnnnnnnnnnnnnnnnnnnnnnnnnnnnnnnnnnnnnnnnnnnnnnnnnnnnnnnnnnnnnnnnnnnnnnnnnnnnnnnnnnnnnnnnnnnnnnnnnnnnnnnnnnnnnnnnnnnnnnnnnnnnnnnnnnnnnnnnnnnnnnnnnnnnnnnnnnnnnnnnnnnnnnnnnnnnnnnnnnnnnnnnnnnnnnnnnnnnnnnnnnnnnnnnnnnnnnnnnnnnnnnnnnnnnnnnnnnnnnnnnnnnnnnnnnnnnnnnnnnnnnnnnnnnnnnnnnnnnnnnnnnnnnnnnnnnnnnnnnnnnnnnnnnnnnnnnnnnnnnnnnnnnnnnnnnnnnnnnnnnnnnnnnnnnnnnnnnnnnnnnnnnnnnnnnnnnnnnnnnnnnnnnnnnnnnnnnnnnnnnnnnnnnnnnnnnnnnnnnnnnnnnnnnnnnnnnnnnnnnnnnnnnnnnnnnnnnnnnnnnnnnnnnnnnnnnnnnnnnnnnnnnnnnnnnnnnnnnnnnnnnnnnnnnnnnnnnnnnnnnnnnnnnnnnnnnnnnnnnnnnnnnnnnnnnnnnnnnnnnnnnnnnnnnnnnnnnnnnnnnnnnnnnnnnnnnnnnnnnnnnnnnnnnnnnnnnnnnnnnnnnnnnnnnnnnnnnnnnnnnnnnnnnnnnnnnnnnnnnnnnnnnnnnnnnnnnnnnnnnnnnnnnnnnnnnnnnnnnnnnnnnnnnnnnnnnnnnnnnnnnnnnnnnnnnnnnnnnnnnnnnnnnnnnnnnnnnnnnnnnnnnnnnnnnnnnnnnnnnnnnnnnnnnnnnnnnnnnnnnnnnnnnnnnnnnnnnnnnnnnnnnnnnnnnnnnnnnnnnnnnnnnnnnnnnnnnnnnnnnnnnnnnnnnnnnnnnnnnnnnnnnnnnnnnnnnnnnnnnnnnnnnnnnnnnnnnnnnnnnnnnnnnnnnnnnnnnnnnnnnnnnnnnnnnnnnnnnnnnnnnnnnnnnnnnnnnnnnnnnnnnnnnnnnnnnnnnnnnnnnnnnnnnnnnnnnnnnnnnnnnnnnnnnnnnnnnnnnnnnnnnnnnnnnnnnnnnnnnnnnnnnnnnnnnnnnnnnnnnnnnnnnnnnnnnnnnnnnnnnnnnnnnnnnnnnnnnnnnnnnnnnnnnnnnnnnnnnnnnnnnnnnnnnnnnnnnnnnnnnnnnnnnnnnnnnnnnnnnnnnnnnnnnnnnnnnnnnnnnnnnnnnnnnnnnnnnnnnnnnnnnnnnnnnnnnnnnnnnnnnnnnnnnnnnnnnnnnnnnnnnnnnnnnnnnnnnnnnnnnnnnnnnnnnnnnnnnnnnnnnnnnnnnnnnnnnnnnnnnnnnnnnnnnnnnnnnnnnnnnnnnnnnnnnnnnnnnnnnnnnnnnnnnnnnnnnnnnnnnnnnnnnnnnnnnnnnnnnnnnnnnnnnnnnnnnnnnnnnnnnnnnnnnnnnnnnnnnnnnnnnnnnnnnnnnnnnnnnnnnnnnnnnnnnnnnnnnnnnnnnnnnnnnnnnnnnnnnnnnnnnnnnnnnnnnnnnnnnnnnnnnnnnnnnnnnnnnnnnnnnnnnnnnnnnnnnnnnnnnnnnnnnnnnnnnnnnnnnnnnnnnnnnnnnnnnnnnnnnnnnnnnnnnnnnnnnnnnnnnnnnnnnnnnnnnnnnnnnnnnnnnnnnnnnnnnnnnnnnnnnnnnnnnnnnnnnnnnnnnnnnnnnnnnnnnnnnnnnnnnnnnnnnnnnnnnnnnnnnnnnnnnnnnnnnnnnnnnnnnnnnnnnnnnnnnnnnnnnnnnnnnnnnnnnnnnnnnnnnnnnnnnnnnnnnnnnnnnnnnnnnnnnnnnnnnnnnnnnnnnnnnnnnnnnnnnnnnnnnnnnnnnnnnnnnnnnnnnnnnnnnnnnnnnnnnnnnnnnnnnnnnnnnnnnnnnnnnnnnnnnnnnnnnnnnnnnnnnnnnnnnnnnnnnnnnnnnnnnnnnnnnnnnnnnnnnnnnnnnnnnnnnnnnnnnnnnnnnnnnnnnnnnnnnnnnnnnnnnnnnnnnnnnnnnnnnnnnnnnnnnnnnnnnnnnnnnnnnnnnnnnnnnnnnnnnnnnnnnnnnnnnnnnnnnnnnnnnnnnnnnnnnnnnnnnnnnnnnnnnnnnnnnnnnnnnnnnnnnnnnnnnnnnnnnnnnnnnnnnnnnnnnnnnnnnnnnnnnnnnnnnnnnnnnnnnnnnnnnnnnnnnnnnnnnnnnnnnnnnnnnnnnnnnnnnnnnnnnnnnnnnnnnnnnnnnnnnnnnnnnnnnnnnnnnnnnnnnnnnnnnnnnnnnnnnnnnnnnnnnnnnnnnnnnnnnnnnnnnnnnnnnnnnnnnnnnnnnnnnnnnnnnnnnnnnnnnnnnnnnnnnnnnnnnnnnnnnnnnnnnnnnnnnnnnnnnnnnnnnnnnnnnnnnnnnnnnnnnnnnnnnnnnnnnnnnnnnnnnnnnnnnnnnnnnnnnnnnnnnnnnnnnnnnnnnnnnnnnnnnnnnnnnnnnnnnnnnnnnnnnnnnnnnnnnnnnnnnnnnnnnnnnnnnnnnnnnnnnnnnnnnnnnnnnnnnnnnnnnnnnnnnnnnnnnnnnnnnnnnnnnnnnnnnnnnnnnnnnnnnnnnnnnnnnnnnnnnnnnnnnnnnnnnnnnnnnnnnnnnnnnnnnnnnnnnnnnnnnnnnnnnnnnnnnnnnnnnnnnnnnnnnnnnnnnnnnnnnnnnnnnnnnnnnnnnnnnnnnnnnnnnnnnnnnnnnnnnnnnnnnnnnnnnnnnnnnnnnnnnnnnnnnnnnnnnnnnnnnnnnnnnnnnnnnnnnnnnnnnnnnnnnnnnnnnnnnnnnnnnnnnnnnnnnnnnnnnnnnnnnnnnnnnnnnnnnnnnnnnnnnnnnnnnnnnnnnnnnnnnnnnnnnnnnnnnnnnnnnnnnnnnnnnnnnnnnnnnnnnnnnnnnnnnnnnnnnnnnnnnnnnnnnnnnnnnnnnnnnnnnnnnnnnnnnnnnnnnnnnnnnnnnnnnnnnnnnnnnnnnnnnnnnnnnnnnnnnnnnnnnnnnnnnnnnnnnnnnnnnnnnnnnnnnnnnnnnnnnnnnnnnnnnnnnnnnnnnnnnnnnnnnnnnnnnnnnnnnnnnnnnnnnnnnnnnnnnnnnnnnnnnnnnnnnnnnnnnnnnnnnnnnnnnnnnnnnnnnnnnnnnnnnnnnnnnnnnnnnnnnnnnnnnnnnnnnnnnnnnnnnnnnnnnnnnnnnnnnnnnnnnnnnnnnnnnnnnnnnnnnnnnnnnnnnnnnnnnnnnnnnnnnnnnnnnnnnnnnnnnnnnnnnnnnnnnnnnnnnnnnnnnnnnnnnnnnnnnnnnnnnnnnnnnnnnnnnnnnnnnnnnnnnnnnnnnnnnnnnnnnnnnnnnnnnnnnnnnnnnnnnnnnnnnnnnnnnnnnnnnnnnnnnnnnnnnnnnnnnnnnnnnnnnnnnnnnnnnnnnnnnnnnnnnnnnnnnnnnnnnnnnnnnnnnnnnnnnnnnnnnnnnnnnnnnnnnnnnnnnnnnnnnnnnnnnnnnnnnnnnnnnnnnnnnnnnnnnnnnnnnnnnnnnnnnnnnnnnnnnnnnnnnnnnnnnnnnnnnnnnnnnnnnnnnnnnnnnnnnnnnnnnnnnnnnnnnnnnnnnnnnnnnnnnnnnnnnnnnnnnnnnnnnnnnnnnnnnnnnnnnnnnnnnnnnnnnnnnnnnnnnnnnnnnnnnnnnnnnnnnnnnnnnnnnnnnnnnnnnnnnnnnnnnnnnnnnnnnnnnnnnnnnnnnnnnnnnnnnnnnnnnnnnnnnnnnnnnnnnnnnnnnnnnnnnnnnnnnnnnnnnnnnnnnnnnnnnnnnnnnnnnnnnnnnnnnnnnnnnnnnnnnnnnnnnnnnnnnnnnnnnnnnnnnnnnnnnnnnnnnnnnnnnnnnnnnnnnnnnnnnnnnnnnnnnnnnnnnnnnnnnnnnnnnnnnnnnnnnnnnnnnnnnnnnnnnnnnnnnnnnnnnnnnnnnnnnnnnnnnnnnnnnnnnnnnnnnnnnnnnnnnnnnnnnnnnnnnnnnnnnnnnnnnnnnnnnnnnnnnnnnnnnnnnnnnnnnnnnnnnnnnnnnnnnnnnnnnnnnnnnnnnnnnnnnnnnnnnnnnnnnnnnnnnnnnnnnnnnnnnnnnnnnnnnnnnnnnnnnnnnnnnnnnnnnnnnnnnnnnnnnnnnnnnnnnnnnnnnnnnnnnnnnnnnnnnnnnnnnnnnnnnnnnnnnnnnnnnnnnnnnnnnnnnnnnnnnnnnnnnnnnnnnnnnnnnnnnnnnnnnnnnnnnnnnnnnnnnnnnnnnnnnnnnnnnnnnnnnnnnnnnnnnnnnnnnnnnnnnnnnnnnnnnnnnnnnnnnnnnnnnnnnnnnnnnnnnnnnnnnnnnnnnnnnnnnnnnnnnnnnnnnnnnnnnnnnnnnnnnnnnnnnnnnnnnnnnnnnnnnnnnnnnnnnnnnnnnnnnnnnnnnnnnnnnnnnnnnnnnnnnnnnnnnnnnnnnnnnnnnnnnnnnnnnnnnnnnnnnnnnnnnnnnnnnnnnnnnnnnnnnnnnnnnnnnnnnnnnnnnnnnnnnnnnnnnnnnnnnnnnnnnnnnnnnnnnnnnnnnnnnnnnnnnnnnnnnnnnnnnnnnnnnnnnnnnnnnnnnnnnnnnnnnnnnnnnnnnnnnnnnnnnnnnnnnnnnnnnnnnnnnnnnnnnnnnnnnnnnnnnnnnnnnnnnnnnnnnnnnnnnnnnnnnnnnnnnnnnnnnnnnnnnnnnnnnnnnnnnnnnnnnnnnnnnnnnnnnnnnnnnnnnnnnnnnnnnnnnnnnnnnnnnnnnnnnnnnnnnnnnnnnnnnnnnnnnnnnnnnnnnnnnnnnnnnnnnnnnnnnnnnnnnnnnnnnnnnnnnnnnnnnnnnnnnnnnnnnnnnnnnnnnnnnnnnnnnnnnnnnnnnnnnnnnnnnnnnnnnnnnnnnnnnnnnnnnnnnnnnnnnnnnnnnnnnnnnnnnnnnnnnnnnnnnnnnnnnnnnnnnnnnnnnnnnnnnnnnnnnnnnnnnnnnnnnnnnnnnnnnnnnnnnnnnnnnnnnnnnnnnnnnnnnnnnnnnnnnnnnnnnnnnnnnnnnnnnnnnnnnnnnnnnnnnnnnnnnnnnnnnnnnnnnnnnnnnnnnnnnnnnnnnnnnnnnnnnnnnnnnnnnnnnnnnnnnnnnnnnnnnnnnnnnnnnnnnnnnnnnnnnnnnnnnnnnnnnnnnnnnnnnnnnnnnnnnnnnnnnnnnnnnnnnnnnnnnnnnnnnnnnnnnnnnnnnnnnnnnnnnnnnnnnnnnnnnnnnnnnnnnnnnnnnnnnnnnnnnnnnnnnnnnnnnnnnnnnnnnnnnnnnnnnnnnnnnnnnnnnnnnnnnnnnnnnnnnnnnnnnnnnnnnnnnnnnnnnnnnnnnnnnnnnnnnnnnnnnnnnnnnnnnnnnnnnnnnnnnnnnnnnnnnnnnnnnnnnnnnnnnnnnnnnnnnnnnnnnnnnnnnnnnnnnnnnnnnnnnnnnnnnnnnnnnnnnnnnnnnnnnnnnnnnnnnnnnnnnnnnnnnnnnnnnnnnnnnnnnnnnnnnnnnnnnnnnnnnnnnnnnnnnnnnnnnnnnnnnnnnnnnnnnnnnnnnnnnnnnnnnnnnnnnnnnnnnnnnnnnnnnnnnnnnnnnnnnnnnnnnnnnnnnnnnnnnnnnnnnnnnnnnnnnnnnnnnnnnnnnnnnnnnnnnnnnnnnnnnnnnnnnnnnnnnnnnnnnnnnnnnnnnnnnnnnnnnnnnnnnnnnnnnnnnnnnnnnnnnnnnnnnnnnnnnnnnnnnnnnnnnnnnnnnnnnnnnnnnnnnnnnnnnnnnnnnnnnnnnnnnnnnnnnnnnnnnnnnnnnnnnnnnnnnnnnnnnnnnnnnnnnnnnnnnnnnnnnnnnnnnnnnnnnnnnnnnnnnnnnnnnnnnnnnnnnnnnnnnnnnnnnnnnnnnnnnnnnnnnnnnnnnnnnnnnnnnnnnnnnnnnnnnnnnnnnnnnnnnnnnnnnnnnnnnnnnnnnnnnnnnnnnnnnnnnnnnnnnnnnnnnnnnnnnnnnnnnnnnnnnnnnnnnnnnnnnnnnnnnnnnnnnnnnnnnnnnnnnnnnnnnnnnnnnnnnnnnnnnnnnnnnnnnnnnnnnnnnnnnnnnnnnnnnnnnnnnnnnnnnnnnnnnnnnnnnnnnnnnnnnnnnnnnnnnnnnnnnnnnnnnnnnnnnnnnnnnnnnnnnnnnnnnnnnnnnnnnnnnnnnnnnnnnnnnnnnnnnnnnnnnnnnnnnnnnnnnnnnnnnnnnnnnnnnnnnnnnnnnnnnnnnnnnnnnnnnnnnnnnnnnnnnnnnnnnnnnnnnnnnnnnnnnnnnnnnnnnnnnnnnnnnnnnnnnnnnnnnnnnnnnnnnnnnnnnnnnnnnnnnnnnnnnnnnnnnnnnnnnnnnnnnnnnnnnnnnnnnnnnnnnnnnnnnnnnnnnnnnnnnnnnnnnnnnnnnnnnnnnnnnnnnnnnnnnnnnnnnnnnnnnnnnnnnnnnnnnnnnnnnnnnnnnnnnnnnnnnnnnnnnnnnnnnnnnnnnnnnnnnnnnnnnnnnnnnnnnnnnnnnnnnnnnnnnnnnnnnnnnnnnnnnnnnnnnnnnnnnnnnnnnnnnnnnnnnnnnnnnnnnnnnnnnnnnnnnnnnnnnnnnnnnnnnnnnnnnnnnnnnnnnnnnnnnnnnnnnnnnnnnnnnnnnnnnnnnnnnnnnnnnnnnnnnnnnnnnnnnnnnnnnnnnnnnnnnnnnnnnnnnnnnnnnnnnnnnnnnnnnnnnnnnnnnnnnnnnnnnnnnnnnnnnnnnnnnnnnnnnnnnnnnnnnnnnnnnnnnnnnnnnnnnnnnnnnnnnnnnnnnnnnnnnnnnnnnnnnnnnnnnnnnnnnnnnnnnnnnnnnnnnnnnnnnnnnnnnnnnnnnnnnnnnnnnnnnnnnnnnnnnnnnnnnnnnnnnnnnnnnnnnnnnnnnnnnnnnnnnnnnnnnnnnnnnnnnnnnnnnnnnnnnnnnnnnnnnnnnnnnnnnnnnnnnnnnnnnnnnnnnnnnnnnnnnnnnnnnnnnnnnnnnnnnnnnnnnnnnnnnnnnnnnnnnnnnnnnnnnnnnnnnnnnnnnnnnnnnnnnnnnnnnnnnnnnnnnnnnnnnnnnnnnnnnnnnnnnnnnnnnnnnnnnnnnnnnnnnnnnnnnnnnnnnnnnnnnnnnnnnnnnnnnnnnnnnnnnnnnnnnnnnnnnnnnnnnnnnnnnnnnnnnnnnnnnnnnnnnnnnnnnnnnnnnnnnnnnnnnnnnnnnnnnnnnnnnnnnnnnnnnnnnnnnnnnnnnnnnnnnnnnnnnnnnnnnnnnnnnnnnnnnnnnnnnnnnnnnnnnnnnnnnnnnnnnnnnnnnnnnnnnnnnnnnnnnnnnnnnnnnnnnnnnnnnnnnnnnnnnnnnnnnnnnnnnnnnnnnnnnnnnnnnnnnnnnnnnnnnnnnnnnnnnnnnnnnnnnnnnnnnnnnnnnnnnnnnnnnnnnnnnnnnnnnnnnnnnnnnnnnnnnnnnnnnnnnnnnnnnnnnnnnnnnnnnnnnnnnnnnnnnnnnnnnnnnnnnnnnnnnnnnnnnnnnnnnnnnnnnnnnnnnnnnnnnnnnnnnnnnnnnnnnnnnnnnnnnnnnnnnnnnnnnnnnnnnnnnnnnnnnnnnnnnnnnnnnnnnnnnnnnnnnnnnnnnnnnnnnnnnnnnnnnnnnnnnnnnnnnnnnnnnnnnnnnnnnnnnnnnnnnnnnnnnnnnnnnnnnnnnnnnnnnnnnnnnnnnnnnnnnnnnnnnnnnnnnnnnnnnnnnnnnnnnnnnnnnnnnnnnnnnnnnnnnnnnnnnnnnnnnnnnnnnnnnnnnnnnnnnnnnnnnnnnnnnnnnnnnnnnnnnnnnnnnnnnnnnnnnnnnnnnnnnnnnnnnnnnnnnnnnnnnnnnnnnnnnnnnnnnnnnnnnnnnnnnnnnnnnnnnnnnnnnnnnnnnnnnnnnnnnnnnnnnnnnnnnnnnnnnnnnnnnnnnnnnnnnnnnnnnnnnnnnnnnnnnnnnnnnnnnnnnnnnnnnnnnnnnnnnnnnnnnnnnnnnnnnnnnnnnnnnnnnnnnnnnnnnnnnnnnnnnnnnnnnnnnnnnnnnnnnnnnnnnnnnnnnnnnnnnnnnnnnnnnnnnnnnnnnnnnnnnnnnnnnnnnnnnnnnnnnnnnnnnnnnnnnnnnnnnnnnnnnnnnnnnnnnnnnnnnnnnnnnnnnnnnnnnnnnnnnnnnnnnnnnnnnnnnnnnnnnnnnnnnnnnnnnnnnnnnnnnnnnnnnnnnnnnnnnnnnnnnnnnnnnnnnnnnnnnnnnnnnnnnnnnnnnnnnnnnnnnnnnnnnnnnnnnnnnnnnnnnnnnnnnnnnnnnnnnnnnnnnnnnnnnnnnnnnnnnnnnnnnnnnnnnnnnnnnnnnnnnnnnnnnnnnnnnnnnnnnnnnnnnnnnnnnnnnnnnnnnnnnnnnnnnnnnnnnnnnnnnnnnnnnnnnnnnnnnnnnnnnnnnnnnnnnnnnnnnnnnnnnnnnnnnnnnnnnnnnnnnnnnnnnnnnnnnnnnnnnnnnnnnnnnnnnnnnnnnnnnnnnnnnnnnnnnnnnnnnnnnnnnnnnnnnnnnnnnnnnnnnnnnnnnnnnnnnnnnnnnnnnnnnnnnnnnnnnnnnnnnnnnnnnnnnnnnnnnnnnnnnnnnnnnnnnnnnnnnnnnnnnnnnnnnnnnnnnnnnnnnnnnnnnnnnnnnnnnnnnnnnnnnnnnnnnnnnnnnnnnnnnnnnnnnnnnnnnnnnnnnnnnnnnnnnnnnnnnnnnnnnnnnnnnnnnnnnnnnnnnnnnnnnnnnnnnnnnnnnnnnnnnnnnnnnnnnnnnnnnnnnnnnnnnnnnnnnnnnnnnnnnnnnnnnnnnnnnnnnnnnnnnnnnnnnnnnnnnnnnnnnnnnnnnnnnnnnnnnnnnnnnnnnnnnnnnnnnnnnnnnnnnnnnnnnnnnnnnnnnnnnnnnnnnnnnnnnnnnnnnnnnnnnnnnnnnnnnnnnnnnnnnnnnnnnnnnnnnnnnnnnnnnnnnnnnnnnnnnnnnnnnnnnnnnnnnnnnnnnnnnnnnnnnnnnnnnnnnnnnnnnnnnnnnnnnnnnnnnnnnnnnnnnnnnnnnnnnnnnnnnnnnnnnnnnnnnnnnnnnnnnnnnnnnnnnnnnnnnnnnnnnnnnnnnnnnnnnnnnnnnnnnnnnnnnnnnnnnnnnnnnnnnnnnnnnnnnnnnnnnnnnnnnnnnnnnnnnnnnnnnnnnnnnnnnnnnnnnnnnnnnnnnnnnnnnnnnnnnnnnnnnnnnnnnnnnnnnnnnnnnnnnnnnnnnnnnnnnnnnnnnnnnnnnnnnnnnnnnnnnnnnnnnnnnnnnnnnnnnnnnnnnnnnnnnnnnnnnnnnnnnnnnnnnnnnnnnnnnnnnnnnnnnnnnnnnnnnnnnnnnnnnnnnnnnnnnnnnnnnnnnnnnnnnnnnnnnnnnnnnnnnnnnnnnnnnnnnnnnnnnnnnnnnnnnnnnnnnnnnnnnnnnnnnnnnnnnnnnnnnnnnnnnnnnnnnnnnnnnnnnnnnnnnnnnnnnnnnnnnnnnnnnnnnnnnnnnnnnnnnnnnnnnnnnnnnnnnnnnnnnnnnnnnnnnnnnnnnnnnnnnnnnnnnnnnnnnnnnnnnnnnnnnnnnnnnnnnnnnnnnnnnnnnnnnnnnnnnnnnnnnnnnnnnnnnnnnnnnnnnnnnnnnnnnnnnnnnnnnnnnnnnnnnnnnnnnnnnnnnnnnnnnnnnnnnnnnnnnnnnnnnnnnnnnnnnnnnnnnnnnnnnnnnnnnnnnnnnnnnnnnnnnnnnnnnnnnnnnnnnnnnnnnnnnnnnnnnnnnnnnnnnnnnnnnnnnnnnnnnnnnnnnnnnnnnnnnnnnnnnnnnnnnnnnnnnnnnnnnnnnnnnnnnnnnnnnnnnnnnnnnnnnnnnnnnnnnnnnnnnnnnnnnnnnnnnnnnnnnnnnnnnnnnnnnnnnnnnnnnnnnnnnnnnnnnnnnnnnnnnnnnnnnnnnnnnnnnnnnnnnnnnnnnnnnnnnnnnnnnnnnnnnnnnnnnnnnnnnnnnnnnnnnnnnnnnnnnnnnnnnnnnnnnnnnnnnnnnnnnnnnnnnnnnnnnnnnnnnnnnnnnnnnnnnnnnnnnnnnnnnnnnnnnnnnnnnnnnnnnnnnnnnnnnnnnnnnnnnnnnnnnnnnnnnnnnnnnnnnnnnnnnnnnnnnnnnnnnnnnnnnnnnnnnnnnnnnnnnnnnnnnnnnnnnnnnnnnnnnnnnnnnnnnnnnnnnnnnnnnnnnnnnnnnnnnnnnnnnnnnnnnnnnnnnnnnnnnnnnnnnnnnnnnnnnnnnnnnnnnnnnnnnnnnnnnnnnnnnnnnnnnnnnnnnnnnnnnnnnnnnnnnnnnnnnnnnnnnnnnnnnnnnnnnnnnnnnnnnnnnnnnnnnnnnnnnnnnnnnnnnnnnnnnnnnnnnnnnnnnnnnnnnnnnnnnnnnnnnnnnnnnnnnnnnnnnnnnnnnnnnnnnnnnnnnnnnnnnnnnnnnnnnnnnnnnnnnnnnnnnnnnnnnnnnnnnnnnnnnnnnnnnnnnnnnnnnnnnnnnnnnnnnnnnnnnnnnnnnnnnnnnnnnnnnnnnnnnnnnnnnnnnnnnnnnnnnnnnnnnnnnnnnnnnnnnnnnnnnnnnnnnnnnnnnnnnnnnnnnnnnnnnnnnnnnnnnnnnnnnnnnnnnnnnnnnnnnnnnnnnnnnnnnnnnnnnnnnnnnnnnnnnnnnnnnnnnnnnnnnnnnnnnnnnnnnnnnnnnnnnnnnnnnnnnnnnnnnnnnnnnnnnnnnnnnnnnnnnnnnnnnnnnnnnnnnnnnnnnnnnnnnnnnnnnnnnnnnnnnnnnnnnnnnnnnnnnnnnnnnnnnnnnnnnnnnnnnnnnnnnnnnnnnnnnnnnnnnnnnnnnnnnnnnnnnnnnnnnnnnnnnnnnnnnnnnnnnnnnnnnnnnnnnnnnnnnnnnnnnnnnnnnnnnnnnnnnnnnnnnnnnnnnnnnnnnnnnnnnnnnnnnnnnnnnnnnnnnnnnnnnnnnnnnnnnnnnnnnnnnnnnnnnnnnnnnnnnnnnnnnnnnnnnnnnnnnnnnnnnnnnnnnnnnnnnnnnnnnnnnnnnnnnnnnnnnnnnnnnnnnnnnnnnnnnnnnnnnnnnnnnnnnnnnnnnnnnnnnnnnnnnnnnnnnnnnnnnnnnnnnnnnnnnnnnnnnnnnnnnnnnnnnnnnnnnnnnnnnnnnnnnnnnnnnnnnnnnnnnnnnnnnnnnnnnnnnnnnnnnnnnnnnnnnnnnnnnnnnnnnnnnnnnnnnnnnnnnnnnnnnnnnnnnnnnnnnnnnnnnnnnnnnnnnnnnnnnnnnnnnnnnnnnnnnnnnnnnnnnnnnnnnnnnnnnnnnnnnnnnnnnnnnnnnnnnnnnnnnnnnnnnnnnnnnnnnnnnnnnnnnnnnnnnnnnnnnnnnnnnnnnnnnnnnnnnnnnnnnnnnnnnnnnnnnnnnnnnnnnnnnnnnnnnnnnnnnnnnnnnnnnnnnnnnnnnnnnnnnnnnnnnnnnnnnnnnnnnnnnnnnnnnnnnnnnnnnnnnnnnnnnnnnnnnnnnnnnnnnnnnnnnnnnnnnnnnnnnnnnnnnnnnnnnnnnnnnnnnnnnnnnnnnnnnnnnnnnnnnnnnnnnnnnnnnnnnnnnnnnnnnnnnnnnnnnnnnnnnnnnnnnnnnnnnnnnnnnnnnnnnnnnnnnnnnnnnnnnnnnnnnnnnnnnnnnnnnnnnnnnnnnnnnnnnnnnnnnnnnnnnnnnnnnnnnnnnnnnnnnnnnnnnnnnnnnnnnnnnnnnnnnnnnnnnnnnnnnnnnnnnnnnnnnnnnnnnnnnnnnnnnnnnnnnnnnnnnnnnnnnnnnnnnnnnnnnnnnnnnnnnnnnnnnnnnnnnnnnnnnnnnnnnnnnnnnnnnnnnnnnnnnnnnnnnnnnnnnnnnnnnnnnnnnnnnnnnnnnnnnnnnnnnnnnnnnnnnnnnnnnnnnnnnnnnnnnnnnnnnnnnnnnnnnnnnnnnnnnnnnnnnnnnnnnnnnnnnnnnnnnnnnnnnnnnnnnnnnnnnnnnnnnnnnnnnnnnnnnnnnnnnnnnnnnnnnnnnnnnnnnnnnnnnnnnnnnnnnnnnnnnnnnnnnnnnnnnnnnnnnnnnnnnnnnnnnnnnnnnnnnnnnnnnnnnnnnnnnnnnnnnnnnnnnnnnnnnnnnnnnnnnnnnnnnnnnnnnnnnnnnnnnnnnnnnnnnnnnnnnnnnnnnnnnnnnnnnnnnnnnnnnnnnnnnnnnnnnnnnnnnnnnnnnnnnnnnnnnnnnnnnnnnnnnnnnnnnnnnnnnnnnnnnnnnnnnnnnnnnnnnnnnnnnnnnnnnnnnnnnnnnnnnnnnnnnnnnnnnnnnnnnnnnnnnnnnnnnnnnnnnnnnnnnnnnnnnnnnnnnnnnnnnnnnnnnnnnnnnnnnnnnnnnnnnnnnnnnnnnnnnnnnnnnnnnnnnnnnnnnnnnnnnnnnnnnnnnnnnnnnnnnnnnnnnnnnnnnnnnnnnnnnnnnnnnnnnnnnnnnnnnnnnnnnnnnnnnnnnnnnnnnnnnnnnnnnnnnnnnnnnnnnnnnnnnnnnnnnnnnnnnnnnnnnnnnnnnnnnnnnnnnnnnnnnnnnnnnnnnnnnnnnnnnnnnnnnnnnnnnnnnnnnnnnnnnnnnnnnnnnnnnnnnnnnnnnnnnnnnnnnnnnnnnnnnnnnnnnnnnnnnnnnnnnnnnnnnnnnnnnnnnnnnnnnnnnnnnnnnnnnnnnnnnnnnnnnnnnnnnnnnnnnnnnnnnnnnnnnnnnnnnnnnnnnnnnnnnnnnnnnnnnnnnnnnnnnnnnnnnnnnnnnnnnnnnnnnnnnnnnnnnnnnnnnnnnnnnnnnnnnnnnnnnnnnnnnnnnnnnnnnnnnnnnnnnnnnnnnnnnnnnnnnnnnnnnnnnnnnnnnnnnnnnnnnnnnnnnnnnnnnnnnnnnnnnnnnnnnnnnnnnnnnnnnnnnnnnnnnnnnnnnnnnnnnnnnnnnnnnnnnnnnnnnnnnnnnnnnnnnnnnnnnnnnnnnnnnnnnnnnnnnnnnnnnnnnnnnnnnnnnnnnnnnnnnnnnnnnnnnnnnnnnnnnnnnnnnnnnnnnnnnnnnnnnnnnnnnnnnnnnnnnnnnnnnnnnnnnnnnnnnnnnnnnnnnnnnnnnnnnnnnnnnnnnnnnnnnnnnnnnnnnnnnnnnnnnnnnnnnnnnnnnnnnnnnnnnnnnnnnnnnnnnnnnnnnnnnnnnnnnnnnnnnnnnnnnnnnnnnnnnnnnnnnnnnnnnnnnnnnnnnnnnnnnnnnnnnnnnnnnnnnnnnnnnnnnnnnnnnnnnnnnnnnnnnnnnnnnnnnnnnnnnnnnnnnnnnnnnnnnnnnnnnnnnnnnnnnnnnnnnnnnnnnnnnnnnnnnnnnnnnnnnnnnnnnnnnnnnnnnnnnnnnnnnnnnnnnnnnnnnnnnnnnnnnnnnnnnnnnnnnnnnnnnnnnnnnnnnnnnnnnnnnnnnnnnnnnnnnnnnnnnnnnnnnnnnnnnnnnnnnnnnnnnnnnnnnnnnnnnnnnnnnnnnnnnnnnnnnnnnnnnnnnnnnnnnnnnnnnnnnnnnnnnnnnnnnnnnnnnnnnnnnnnnnnnnnnnnnnnnnnnnnnnnnnnnnnnnnnnnnnnnnnnnnnnnnnnnnnnnnnnnnnnnnnnnnnnnnnnnnnnnnnnnnnnnnnnnnnnnnnnnnnnnnnnnnnnnnnnnnnnnnnnnnnnnnnnnnnnnnnnnnnnnnnnnnnnnnnnnnnnnnnnnnnnnnnnnnnnnnnnnnnnnnnnnnnnnnnnnnnnnnnnnnnnnnnnnnnnnnnnnnnnnnnnnnnnnnnnnnnnnnnnnnnnnnnnnnnnnnnnnnnnnnnnnnnnnnnnnnnnnnnnnnnnnnnnnnnnnnnnnnnnnnnnnnnnnnnnnnnnnnnnnnnnnnnnnnnnnnnnnnnnnnnnnnnnnnnnnnnnnnnnnnnnnnnnnnnnnnnnnnnnnnnnnnnnnnnnnnnnnnnnnnnnnnnnnnnnnnnnnnnnnnnnnnnnnnnnnnnnnnnnnnnnnnnnnnnnnnnnnnnnnnnnnnnnnnnnnnnnnnnnnnnnnnnnnnnnnnnnnnnnnnnnnnnnnnnnnnnnnnnnnnnnnnnnnnnnnnnnnnnnnnnnnnnnnnnnnnnnnnnnnnnnnnnnnnnnnnnnnnnnnnnnnnnnnnnnnnnnnnnnnnnnnnnnnnnnnnnnnnnnnnnnnnnnnnnnnnnnnnnnnnnnnnnnnnnnnnnnnnnnnnnnnnnnnnnnnnnnnnnnnnnnnnnnnnnnnnnnnnnnnnnnnnnnnnnnnnnnnnnnnnnnnnnnnnnnnnnnnnnnnnnnnnnnnnnnnnnnnnnnnnnnnnnnnnnnnnnnnnnnnnnnnnnnnnnnnnnnnnnnnnnnnnnnnnnnnnnnnnnnnnnnnnnnnnnnnnnnnnnnnnnnnnnnnnnnnnnnnnnnnnnnnnnnnnnnnnnnnnnnnnnnnnnnnnnnnnnnnnnnnnnnnnnnnnnnnnnnnnnnnnnnnnnnnnnnnnnnnnnnnnnnnnnnnnnnnnnnnnnnnnnnnnnnnnnnnnnnnnnnnnnnnnnnnnnnnnnnnnnnnnnnnnnnnnnnnnnnnnnnnnnnnnnnnnnnnnnnnnnnnnnnnnnnnnnnnnnnnnnnnnnnnnnnnnnnnnnnnnnnnnnnnnnnnnnnnnnnnnnnnnnnnnnnnnnnnnnnnnnnnnnnnnnnnnnnnnnnnnnnnnnnnnnnnnnnnnnnnnnnnnnnnnnnnnnnnnnnnnnnnnnnnnnnnnnnnnnnnnnnnnnnnnnnnnnnnnnnnnnnnnnnnnnnnnnnnnnnnnnnnnnnnnnnnnnnnnnnnnnnnnnnnnnnnnnnnnnnnnnnnnnnnnnnnnnnnnnnnnnnnnnnnnnnnnnnnnnnnnnnnnnnnnnnnnnnnnnnnnnnnnnnnnnnnnnnnnnnnnnnnnnnnnnnnnnnnnnnnnnnnnnnnnnnnnnnnnnnnnnnnnnnnnnnnnnnnnnnnnnnnnnnnnnnnnnnnnnnnnnnnnnnnnnnnnnnnnnnnnnnnnnnnnnnnnnnnnnnnnnnnnnnnnnnnnnnnnnnnnnnnnnnnnnnnnnnnnnnnnnnnnnnnnnnnnnnnnnnnnnnnnnnnnnnnnnnnnnnnnnnnnnnnnnnnnnnnnnnnnnnnnnnnnnnnnnnnnnnnnnnnnnnnnnnnnnnnnnnnnnnnnnnnnnnnnnnnnnnnnnnnnnnnnnnnnnnnnnnnnnnnnnnnnnnnnnnnnnnnnnnnnnnnnnnnnnnnnnnnnnnnnnnnnnnnnnnnnnnnnnnnnnnnnnnnnnnnnnnnnnnnnnnnnnnnnnnnnnnnnnnnnnnnnnnnnnnnnnnnnnnnnnnnnnnnnnnnnnnnnnnnnnnnnnnnnnnnnnnnnnnnnnnnnnnnnnnnnnnnnnnnnnnnnnnnnnnnnnnnnnnnnnnnnnnnnnnnnnnnnnnnnnnnnnnnnnnnnnnnnnnnnnnnnnnnnnnnnnnnnnnnnnnnnnnnnnnnnnnnnnnnnnnnnnnnnnnnnnnnnnnnnnnnnnnnnnnnnnnnnnnnnnnnnnnnnnnnnnnnnnnnnnnnnnnnnnnnnnnnnnnnnnnnnnnnnnnnnnnnnnnnnnnnnnnnnnnnnnnnnnnnnnnnnnnnnnnnnnnnnnnnnnnnnnnnnnnnnnnnnnnnnnnnnnnnnnnnnnnnnnnnnnnnnnnnnnnnnnnnnnnnnnnnnnnnnnnnnnnnnnnnnnnnnnnnnnnnnnnnnnnnnnnnnnnnnnnnnnnnnnnnnnnnnnnnnnnnnnnnnnnnnnnnnnnnnnnnnnnnnnnnnnnnnnnnnnnnnnnnnnnnnnnnnnnnnnnnnnnnnnnnnnnnnnnnnnnnnnnnnnnnnnnnnnnnnnnnnnnnnnnnnnnnnnnnnnnnnnnnnnnnnnnnnnnnnnnnnnnnnnnnnnnnnnnnnnnnnnnnnnnnnnnnnnnnnnnnnnnnnnnnnnnnnnnnnnnnnnnnnnnnnnnnnnnnnnnnnnnnnnnnnnnnnnnnnnnnnnnnnnnnnnnnnnnnnnnnnnnnnnnnnnnnnnnnnnnnnnnnnnnnnnnnnnnnnnnnnnnnnnnnnnnnnnnnnnnnnnnnnnnnnnnnnnnnnnnnnnnnnnnnnnnnnnnnnnnnnnnnnnnnnnnnnnnnnnnnnnnnnnnnnnnnnnnnnnnnnnnnnnnnnnnnnnnnnnnnnnnnnnnnnnnnnnnnnnnnnnnnnnnnnnnnnnnnnnnnnnnnnnnnnnnnnnnnnnnnnnnnnnnnnnnnnnnnnnnnnnnnnnnnnnnnnnnnnnnnnnnnnnnnnnnnnnnnnnnnnnnnnnnnnnnnnnnnnnnnnnnnnnnnnnnnnnnnnnnnnnnnnnnnnnnnnnnnnnnnnnnnnnnnnnnnnnnnnnnnnnnnnnnnnnnnnnnnnnnnnnnnnnnnnnnnnnnnnnnnnnnnnnnnnnnnnnnnnnnnnnnnnnnnnnnnnnnnnnnnnnnnnnnnnnnnnnnnnnnnnnnnnnnnnnnnnnnnnnnnnnnnnnnnnnnnnnnnnnnnnnnnnnnnnnnnnnnnnnnnnnnnnnnnnnnnnnnnnnnnnnnnnnnnnnnnnnnnnnnnnnnnnnnnnnnnnnnnnnnnnnnnnnnnnnnnnnnnnnnnnnnnnnnnnnnnnnnnnnnnnnnnnnnnnnnnnnnnnnnnnnnnnnnnnnnnnnnnnnnnnnnnnnnnnnnnnnnnnnnnnnnnnnnnnnnnnnnnnnnnnnnnnnnnnnnnnnnnnnnnnnnnnnnnnnnnnnnnnnnnnnnnnnnnnnnnnnnnnnnnnnnnnnnnnnnnnnnnnnnnnnnnnnnnnnnnnnnnnnnnnnnnnnnnnnnnnnnnnnnnnnnnnnnnnnnnnnnnnnnnnnnnnnnnnnnnnnnnnnnnnnnnnnnnnnnnnnnnnnnnnnnnnnnnnnnnnnnnnnnnnnnnnnnnnnnnnnnnnnnnnnnnnnnnnnnnnnnnnnnnnnnnnnnnnnnnnnnnnnnnnnnnnnnnnnnnnnnnnnnnnnnnnnnnnnnnnnnnnnnnnnnnnnnnnnnnnnnnnnnnnnnnnnnnnnnnnnnnnnnnnnnnnnnnnnnnnnnnnnnnnnnnnnnnnnnnnnnnnnnnnnnnnnnnnnnnnnnnnnnnnnnnnnnnnnnnnnnnnnnnnnnnnnnnnnnnnnnnnnnnnnnnnnnnnnnnnnnnnnnnnnnnnnnnnnnnnnnnnnnnnnnnnnnnnnnnnnnnnnnnnnnnnnnnnnnnnnnnnnnnnnnnnnnnnnnnnnnnnnnnnnnnnnnnnnnnnnnnnnnnnnnnnnnnnnnnnnnnnnnnnnnnnnnnnnnnnnnnnnnnnnnnnnnnnnnnnnnnnnnnnnnnnnnnnnnnnnnnnnnnnnnnnnnnnnnnnnnnnnnnnnnnnnnnnnnnnnnnnnnnnnnnnnnnnnnnnnnnnnnnnnnnnnnnnnnnnnnnnnnnnnnnnnnnnnnnnnnnnnnnnnnnnnnnnnnnnnnnnnnnnnnnnnnnnnnnnnnnnnnnnnnnnnnnnnnnnnnnnnnnnnnnnnnnnnnnnnnnnnnnnnnnnnnnnnnnnnnnnnnnnnnnnnnnnnnnnnnnnnnnnnnnnnnnnnnnnnnnnnnnnnnnnnnnnnnnnnnnnnnnnnnnnnnnnnnnnnnnnnnnnnnnnnnnnnnnnnnnnnnnnnnnnnnnnnnnnnnnnnnnnnnnnnnnnnnnnnnnnnnnnnnnnnnnnnnnnnnnnnnnnnnnnnnnnnnnnnnnnnnnnnnnnnnnnnnnnnnnnnnnnnnnnnnnnnnnnnnnnnnnnnnnnnnnnnnnnnnnnnnnnnnnnnnnnnnnnnnnnnnnnnnnnnnnnnnnnnnnnnnnnnnnnnnnnnnnnnnnnnnnnnnnnnnnnnnnnnnnnnnnnnnnnnnnnnnnnnnnnnnnnnnnnnnnnnnnnnnnnnnnnnnnnnnnnnnnnnnnnnnnnnnnnnnnnnnnnnnnnnnnnnnnnnnnnnnnnnnnnnnnnnnnnnnnnnnnnnnnnnnnnnnnnnnnnnnnnnnnnnnnnnnnnnnnnnnnnnnnnnnnnnnnnnnnnnnnnnnnnnnnnnnnnnnnnnnnnnnnnnnnnnnnnnnnnnnnnnnnnnnnnnnnnnnnnnnnnnnnnnnnnnnnnnnnnnnnnnnnnnnnnnnnnnnnnnnnnnnnnnnnnnnnnnnnnnnnnnnnnnnnnnnnnnnnnnnnnnnnnnnnnnnnnnnnnnnnnnnnnnnnnnnnnnnnnnnnnnnnnnnnnnnnnnnnnnnnnnnnnnnnnnnnnnnnnnnnnnnnnnnnnnnnnnnnnnnnnnnnnnnnnnnnnnnnnnnnnnnnnnnnnnnnnnnnnnnnnnnnnnnnnnnnnnnnnnnnnnnnnnnnnnnnnnnnnnnnnnnnnnnnnnnnnnnnnnnnnnnnnnnnnnnnnnnnnnnnnnnnnnnnnnnnnnnnnnnnnnnnnnnnnnnnnnnnnnnnnnnnnnnnnnnnnnnnnnnnnnnnnnnnnnnnnnnnnnnnnnnnnnnnnnnnnnnnnnnnnnnnnnnnnnnnnnnnnnnnnnnnnnnnnnnnnnnnnnnnnnnnnnnnnnnnnnnnnnnnnnnnnnnnnnnnnnnnnnnnnnnnnnnnnnnnnnnnnnnnnnnnnnnnnnnnnnnnnnnnnnnnnnnnnnnnnnnnnnnnnnnnnnnnnnnnnnnnnnnnnnnnnnnnnnnnnnnnnnnnnnnnnnnnnnnnnnnnnnnnnnnnnnnnnnnnnnnnnnnnnnnnnnnnnnnnnnnnnnnnnnnnnnnnnnnnnnnnnnnnnnnnnnnnnnnnnnnnnnnnnnnnnnnnnnnnnnnnnnnnnnnnnnnnnnnnnnnnnnnnnnnnnnnnnnnnnnnnnnnnnnnnnnnnnnnnnnnnnnnnnnnnnnnnnnnnnnnnnnnnnnnnnnnnnnnnnnnnnnnnnnnnnnnnnnnnnnnnnnnnnnnnnnnnnnnnnnnnnnnnnnnnnnnnnnnnnnnnnnnnnnnnnnnnnnnnnnnnnnnnnnnnnnnnnnnnnnnnnnnnnnnnnnnnnnnnnnnnnnnnnnnnnnnnnnnnnnnnnnnnnnnnnnnnnnnnnnnnnnnnnnnnnnnnnnnnnnnnnnnnnnnnnnnnnnnnnnnnnnnnnnnnnnnnnnnnnnnnnnnnnnnnnnnnnnnnnnnnnnnnnnnnnnnnnnnnnnnnnnnnnnnnnnnnnnnnnnnnnnnnnnnnnnnnnnnnnnnnnnnnnnnnnnnnnnnnnnnnnnnnnnnnnnnnnnnnnnnnnnnnnnnnnnnnnnnnnnnnnnnnnnnnnnnnnnnnnnnnnnnnnnnnnnnnnnnnnnnnnnnnnnnnnnnnnnnnnnnnnnnnnnnnnnnnnnnnnnnnnnnnnnnnnnnnnnnnnnnnnnnnnnnnnnnnnnnnnnnnnnnnnnnnnnnnnnnnnnnnnnnnnnnnnnnnnnnnnnnnnnnnnnnnnnnnnnnnnnnnnnnnnnnnnnnnnnnnnnnnnnnnnnnnnnnnnnnnnnnnnnnnnnnnnnnnnnnnnnnnnnnnnnnnnnnnnnnnnnnnnnnnnnnnnnnnnnnnnnnnnnnnnnnnnnnnnnnnnnnnnnnnnnnnnnnnnnnnnnnnnnnnnnnnnnnnnnnnnnnnnnnnnnnnnnnnnnnnnnnnnnnnnnnnnnnnnnnnnnnnnnnnnnnnnnnnnnnnnnnnnnnnnnnnnnnnnnnnnnnnnnnnnnnnnnnnnnnnnnnnnnnnnnnnnnnnnnnnnnnnnnnnnnnnnnnnnnnnnnnnnnnnnnnnnnnnnnnnnnnnnnnnnnnnnnnnnnnnnnnnnnnnnnnnnnnnnnnnnnnnnnnnnnnnnnnnnnnnnnnnnnnnnnnnnnnnnnnnnnnnnnnnnnnnnnnnnnnnnnnnnnnnnnnnnnnnnnnnnnnnnnnnnnnnnnnnnnnnnnnnnnnnnnnnnnnnnnnnnnnnnnnnnnnnnnnnnnnnnnnnnnnnnnnnnnnnnnnnnnnnnnnnnnnnnnnnnnnnnnnnnnnnnnnnnnnnnnnnnnnnnnnnnnnnnnnnnnnnnnnnnnnnnnnnnnnnnnnnnnnnnnnnnnnnnnnnnnnnnnnnnnnnnnnnnnnnnnnnnnnnnnnnnnnnnnnnnnnnnnnnnnnnnnnnnnnnnnnnnnnnnnnnnnnnnnnnnnnnnnnnnnnnnnnnnnnnnnnnnnnnnnnnnnnnnnnnnnnnnnnnnnnnnnnnnnnnnnnnnnnnnnnnnnnnnnnnnnnnnnnnnnnnnnnnnnnnnnnnnnnnnnnnnnnnnnnnnnnnnnnnnnnnnnnnnnnnnnnnnnnnnnnnnnnnnnnnnnnnnnnnnnnnnnnnnnnnnnnnnnnnnnnnnnnnnnnnnnnnnnnnnnnnnnnnnnnnnnnnnnnnnnnnnnnnnnnnnnnnnnnnnnnnnnnnnnnnnnnnnnnnnnnnnnnnnnnnnnnnnnnnnnnnnnnnnnnnnnnnnnnnnnnnnnnnnnnnnnnnnnnnnnnnnnnnnnnnnnnnnnnnnnnnnnnnnnnnnnnnnnnnnnnnnnnnnnnnnnnnnnnnnnnnnnnnnnnnnnnnnnnnnnnnnnnnnnnnnnnnnnnnnnnnnnnnnnnnnnnnnnnnnnnnnnnnnnnnnnnnnnnnnnnnnnnnnnnnnnnnnnnnnnnnnnnnnnnnnnnnnnnnnnnnnnnnnnnnnnnnnnnnnnnnnnnnnnnnnnnnnnnnnnnnnnnnnnnnnnnnnnnnnnnnnnnnnnnnnnnnnnnnnnnnnnnnnnnnnnnnnnnnnnnnnnnnnnnnnnnnnnnnnnnnnnnnnnnnnnnnnnnnnnnnnnnnnnnnnnnnnnnnnnnnnnnnnnnnnnnnnnnnnnnnnnnnnnnnnnnnnnnnnnnnnnnnnnnnnnnnnnnnnnnnnnnnnnnnnnnnnnnnnnnnnnnnnnnnnnnnnnnnnnnnnnnnnnnnnnnnnnnnnnnnnnnnnnnnnnnnnnnnnnnnnnnnnnnnnnnnnnnnnnnnnnnnnnnnnnnnnnnnnnnnnnnnnnnnnnnnnnnnnnnnnnnnnnnnnnnnnnnnnnnnnnnnnnnnnnnnnnnnnnnnnnnnnnnnnnnnnnnnnnnnnnnnnnnnnnnnnnnnnnnnnnnnnnnnnnnnnnnnnnnnnnnnnnnnnnnnnnnnnnnnnnnnnnnnnnnnnnnnnnnnnnnnnnnnnnnnnnnnnnnnnnnnnnnnnnnnnnnnnnnnnnnnnnnnnnnnnnnnnnnnnnnnnnnnnnnnnnnnnnnnnnnnnnnnnnnnnnnnnnnnnnnnnnnnnnnnnnnnnnnnnnnnnnnnnnnnnnnnnnnnnnnnnnnnnnnnnnnnnnnnnnnnnnnnnnnnnnnnnnnnnnnnnnnnnnnnnnnnnnnnnnnnnnnnnnnnnnnnnnnnnnnnnnnnnnnnnnnnnnnnnnnnnnnnnnnnnnnnnnnnnnnnnnnnnnnnnnnnnnnnnnnnnnnnnnnnnnnnnnnnnnnnnnnnnnnnnnnnnnnnnnnnnnnnnnnnnnnnnnnnnnnnnnnnnnnnnnnnnnnnnnnnnnnnnnnnnnnnnnnnnnnnnnnnnnnnnnnnnnnnnnnnnnnnnnnnnnnnnnnnnnnnnnnnnnnnnnnnnnnnnnnnnnnnnnnnnnnnnnnnnnnnnnnnnnnnnnnnnnnnnnnnnnnnnnnnnnnnnnnnnnnnnnnnnnnnnnnnnnnnnnnnnnnnnnnnnnnnnnnnnnnnnnnnnnnnnnnnnnnnnnnnnnnnnnnnnnnnnnnnnnnnnnnnnnnnnnnnnnnnnnnnnnnnnnnnnnnnnnnnnnnnnnnnnnnnnnnnnnnnnnnnnnnnnnnnnnnnnnnnnnnnnnnnnnnnnnnnnnnnnnnnnnnnnnnnnnnnnnnnnnnnnnnnnnnnnnnnnnnnnnnnnnnnnnnnnnnnnnnnnnnnnnnnnnnnnnnnnnnnnnnnnnnnnnnnnnnnnnnnnnnnnnnnnnnnnnnnnnnnnnnnnnnnnnnnnnnnnnnnnnnnnnnnnnnnnnnnnnnnnnnnnnnnnnnnnnnnnnnnnnnnnnnnnnnnnnnnnnnnnnnnnnnnnnnnnnnnnnnnnnnnnnnnnnnnnnnnnnnnnnnnnnnnnnnnnnnnnnnnnnnnnnnnnnnnnnnnnnnnnnnnnnnnnnnnnnnnnnnnnnnnnnnnnnnnnnnnnnnnnnnnnnnnnnnnnnnnnnnnnnnnnnnnnnnnnnnnnnnnnnnnnnnnnnnnnnnnnnnnnnnnnnnnnnnnnnnnnnnnnnnnnnnnnnnnnnnnnnnnnnnnnnnnnnnnnnnnnnnnnnnnnnnnnnnnnnnnnnnnnnnnnnnnnnnnnnnnnnnnnnnnnnnnnnnnnnnnnnnnnnnnnnnnnnnnnnnnnnnnnnnnnnnnnnnnnnnnnnnnnnnnnnnnnnnnnnnnnnnnnnnnnnnnnnnnnnnnnnnnnnnnnnnnnnnnnnnnnnnnnnnnnnnnnnnnnnnnnnnnnnnnnnnnnnnnnnnnnnnnnnnnnnnnnnnnnnnnnnnnnnnnnnnnnnnnnnnnnnnnnnnnnnnnnnnnnnnnnnnnnnnnnnnnnnnnnnnnnnnnnnnnnnnnnnnnnnnnnnnnnnnnnnnnnnnnnnnnnnnnnnnnnnnnnnnnnnnnnnnnnnnnnnnnnnnnnnnnnnnnnnnnnnnnnnnnnnnnnnnnnnnnnnnnnnnnnnnnnnnnnnnnnnnnnnnnnnnnnnnnnnnnnnnnnnnnnnnnnnnnnnnnnnnnnnnnnnnnnnnnnnnnnnnnnnnnnnnnnnnnnnnnnnnnnnnnnnnnnnnnnnnnnnnnnnnnnnnnnnnnnnnnnnnnnnnnnnnnnnnnnnnnnnnnnnnnnnnnnnnnnnnnnnnnnnnnnnnnnnnnnnnnnnnnnnnnnnnnnnnnnnnnnnnnnnnnnnnnnnnnnnnnnnnnnnnnnnnnnnnnnnnnnnnnnnnnnnnnnnnnnnnnnnnnnnnnnnnnnnnnnnnnnnnnnnnnnnnnnnnnnnnnnnnnnnnnnnnnnnnnnnnnnnnnnnnnnnnnnnnnnnnnnnnnnnnnnnnnnnnnnnnnnnnnnnnnnnnnnnnnnnnnnnnnnnnnnnnnnnnnnnnnnnnnnnnnnnnnnnnnnnnnnnnnnnnnnnnnnnnnnnnnnnnnnnnnnnnnnnnnnnnnnnnnnnnnnnnnnnnnnnnnnnnnnnnnnnnnnnnnnnnnnnnnnnnnnnnnnnnnnnnnnnnnnnnnnnnnnnnnnnnnnnnnnnnnnnnnnnnnnnnnnnnnnnnnnnnnnnnnnnnnnnnnnnnnnnnnnnnnnnnnnnnnnnnnnnnnnnnnnnnnnnnnnnnnnnnnnnnnnnnnnnnnnnnnnnnnnnnnnnnnnnnnnnnnnnnnnnnnnnnnnnnnnnnnnnnnnnnnnnnnnnnnnnnnnnnnnnnnnnnnnnnnnnnnnnnnnnnnnnnnnnnnnnnnnnnnnnnnnnnnnnnnnnnnnnnnnnnnnnnnnnnnnnnnnnnnnnnnnnnnnnnnnnnnnnnnnnnnnnnnnnnnnnnnnnnnnnnnnnnnnnnnnnnnnnnnnnnnnnnnnnnnnnnnnnnnnnnnnnnnnnnnnnnnnnnnnnnnnnnnnnnnnnnnnnnnnnnnnnnnnnnnnnnnnnnnnnnnnnnnnnnnnnnnnnnnnnnnnnnnnnnnnnnnnnnnnnnnnnnnnnnnnnnnnnnnnnnnnnnnnnnnnnnnnnnnnnnnnnnnnnnnnnnnnnnnnnnnnnnnnnnnnnnnnnnnnnnnnnnnnnnnnnnnnnnnnnnnnnnnnnnnnnnnnnnnnnnnnnnnnnnnnnnnnnnnnnnnnnnnnnnnnnnnnnnnnnnnnnnnnnnnnnnnnnnnnnnnnnnnnnnnnnnnnnnnnnnnnnnnnnnnnnnnnnnnnnnnnnnnnnnnnnnnnnnnnnnnnnnnnnnnnnnnnnnnnnnnnnnnnnnnnnnnnnnnnnnnnnnnnnnnnnnnnnnnnnnnnnnnnnnnnnnnnnnnnnnnnnnnnnnnnnnnnnnnnnnnnnnnnnnnnnnnnnnnnnnnnnnnnnnnnnnnnnnnnnnnnnnnnnnnnnnnnnnnnnnnnnnnnnnnnnnnnnnnnnnnnnnnnnnnnnnnnnnnnnnnnnnnnnnnnnnnnnnnnnnnnnnnnnnnnnnnnnnnnnnnnnnnnnnnnnnnnnnnnnnnnnnnnnnnnnnnnnnnnnnnnnnnnnnnnnnnnnnnnnnnnnnnnnnnnnnnnnnnnnnnnnnnnnnnnnnnnnnnnnnnnnnnnnnnnnnnnnnnnnnnnnnnnnnnnnnnnnnnnnnnnnnnnnnnnnnnnnnnnnnnnnnnnnnnnnnnnnnnnnnnnnnnnnnnnnnnnnnnnnnnnnnnnnnnnnnnnnnnnnnnnnnnnnnnnnnnnnnnnnnnnnnnnnnnnnnnnnnnnnnnnnnnnnnnnnnnnnnnnnnnnnnnnnnnnnnnnnnnnnnnnnnnnnnnnnnnnnnnnnnnnnnnnnnnnnnnnnnnnnnnnnnnnnnnnnnnnnnnnnnnnnnnnnnnnnnnnnnnnnnnnnnnnnnnnnnnnnnnnnnnnnnnnnnnnnnnnnnnnnnnnnnnnnnnnnnnnnnnnnnnnnnnnnnnnnnnnnnnnnnnnnnnnnnnnnnnnnnnnnnnnnnnnnnnnnnnnnnnnnnnnnnnnnnnnnnnnnnnnnnnnnnnnnnnnnnnnnnnnnnnnnnnnnnnnnnnnnnnnnnnnnnnnnnnnnnnnnnnnnnnnnnnnnnnnnnnnnnnnnnnnnnnnnnnnnnnnnnnnnnnnnnnnnnnnnnnnnnnnnnnnnnnnnnnnnnnnnnnnnnnnnnnnnnnnnnnnnnnnnnnnnnnnnnnnnnnnnnnnnnnnnnnnnnnnnnnnnnnnnnnnnnnnnnnnnnnnnnnnnnnnnnnnnnnnnnnnnnnnnnnnnnnnnnnnnnnnnnnnnnnnnnnnnnnnnnnnnnnnnnnnnnnnnnnnnnnnnnnnnnnnnnnnnnnnnnnnnnnnnnnnnnnnnnnnnnnnnnnnnnnnnnnnnnnnnnnnnnnnnnnnnnnnnnnnnnnnnnnnnnnnnnnnnnnnnnnnnnnnnnnnnnnnnnnnnnnnnnnnnnnnnnnnnnnnnnnnnnnnnnnnnnnnnnnnnnnnnnnnnnnnnnnnnnnnnnnnnnnnnnnnnnnnnnnnnnnnnnnnnnnnnnnnnnnnnnnnnnnnnnnnnnnnnnnnnnnnnnnnnnnnnnnnnnnnnnnnnnnnnnnnnnnnnnnnnnnnnnnnnnnnnnnnnnnnnnnnnnnnnnnnnnnnnnnnnnnnnnnnnnnnnnnnnnnnnnnnnnnnnnnnnnnnnnnnnnnnnnnnnnnnnnnnnnnnnnnnnnnnnnnnnnnnnnnnnnnnnnnnnnnnnnnnnnnnnnnnnnnnnnnnnnnnnnnnnnnnnnnnnnnnnnnnnnnnnnnnnnnnnnnnnnnnnnnnnnnnnnnnnnnnnnnnnnnnnnnnnnnnnnnnnnnnnnnnnnnnnnnnnnnnnnnnnnnnnnnnnnnnnnnnnnnnnnnnnnnnnnnnnnnnnnnnnnnnnnnnnnnnnnnnnnnnnnnnnnnnnnnnnnnnnnnnnnnnnnnnnnnnnnnnnnnnnnnnnnnnnnnnnnnnnnnnnnnnnnnnnnnnnnnnnnnnnnnnnnnnnnnnnnnnnnnnnnnnnnnnnnnnnnnnnnnnnnnnnnnnnnnnnnnnnnnnnnnnnnnnnnnnnnnnnnnnnnnnnnnnnnnnnnnnnnnnnnnnnnnnnnnnnnnnnnnnnnnnnnnnnnnnnnnnnnnnnnnnnnnnnnnnnnnnnnnnnnnnnnnnnnnnnnnnnnnnnnnnnnnnnnnnnnnnnnnnnnnnnnnnnnnnnnnnnnnnnnnnnnnnnnnnnnnnnnnnnnnnnnnnnnnnnnnnnnnnnnnnnnnnnnnnnnnnnnnnnnnnnnnnnnnnnnnnnnnnnnnnnnnnnnnnnnnnnnnnnnnnnnnnnnnnnnnnnnnnnnnnnnnnnnnnnnnnnnnnnnnnnnnnnnnnnnnnnnnnnnnnnnnnnnnnnnnnnnnnnnnnnnnnnnnnnnnnnnnnnnnnnnnnnnnnnnnnnnnnnnnnnnnnnnnnnnnnnnnnnnnnnnnnnnnnnnnnnnnnnnnnnnnnnnnnnnnnnnnnnnnnnnnnnnnnnnnnnnnnnnnnnnnnnnnnnnnnnnnnnnnnnnnnnnnnnnnnnnnnnnnnnnnnnnnnnnnnnnnnnnnnnnnnnnnnnnnnnnnnnnnnnnnnnnnnnnnnnnnnnnnnnnnnnnnnnnnnnnnnnnnnnnnnnnnnnnnnnnnnnnnnnnnnnnnnnnnnnnnnnnnnnnnnnnnnnnnnnnnnnnnnnnnnnnnnnnnnnnnnnnnnnnnnnnnnnnnnnnnnnnnnnnnnnnnnnnnnnnnnnnnnnnnnnnnnnnnnnnnnnnnnnnnnnnnnnnnnnnnnnnnnnnnnnnnnnnnnnnnnnnnnnnnnnnnnnnnnnnnnnnnnnnnnnnnnnnnnnnnnnnnnnnnnnnnnnnnnnnnnnnnnnnnnnnnnnnnnnnnnnnnnnnnnnnnnnnnnnnnnnnnnnnnnnnnnnnnnnnnnnnnnnnnnnnnnnnnnnnnnnnnnnnnnnnnnnnnnnnnnnnnnnnnnnnnnnnnnnnnnnnnnnnnnnnnnnnnnnnnnnnnnnnnnnnnnnnnnnnnnnnnnnnnnnnnnnnnnnnnnnnnnnnnnnnnnnnnnnnnnnnnnnnnnnnnnnnnnnnnnnnnnnnnnnnnnnnnnnnnnnnnnnnnnnnnnnnnnnnnnnnnnnnnnnnnnnnnnnnnnnnnnnnnnnnnnnnnnnnnnnnnnnnnnnnnnnnnnnnnnnnnnnnnnnnnnnnnnnnnnnnnnnnnnnnnnnnnnnnnnnnnnnnnnnnnnnnnnnnnnnnnnnnnnnnnnnnnnnnnnnnnnnnnnnnnnnnnnnnnnnnnnnnnnnnnnnnnnnnnnnnnnnnnnnnnnnnnnnnnnnnnnnnnnnnnnnnnnnnnnnnnnnnnnnnnnnnnnnnnnnnnnnnnnnnnnnnnnnnnnnnnnnnnnnnnnnnnnnnnnnnnnnnnnnnnnnnnnnnnnnnnnnnnnnnnnnnnnnnnnnnnnnnnnnnnnnnnnnnnnnnnnnnnnnnnnnnnnnnnnnnnnnnnnnnnnnnnnnnnnnnnnnnnnnnnnnnnnnnnnnnnnnnnnnnnnnnnnnnnnnnnnnnnnnnnnnnnnnnnnnnnnnnnnnnnnnnnnnnnnnnnnnnnnnnnnnnnnnnnnnnnnnnnnnnnnnnnnnnnnnnnnnnnnnnnnnnnnnnnnnnnnnnnnnnnnnnnnnnnnnnnnnnnnnnnnnnnnnnnnnnnnnnnnnnnnnnnnnnnnnnnnnnnnnnnnnnnnnnnnnnnnnnnnnnnnnnnnnnnnnnnnnnnnnnnnnnnnnnnnnnnnnnnnnnnnnnnnnnnnnnnnnnnnnnnnnnnnnnnnnnnnnnnnnnnnnnnnnnnnnnnnnnnnnnnnnnnnnnnnnnnnnnnnnnnnnnnnnnnnnnnnnnnnnnnnnnnnnnnnnnnnnnnnnnnnnnnnnnnnnnnnnnnnnnnnnnnnnnnnnnnnnnnnnnnnnnnnnnnnnnnnnnnnnnnnnnnnnnnnnnnnnnnnnnnnnnnnnnnnnnnnnnnnnnnnnnnnnnnnnnnnnnnnnnnnnnnnnnnnnnnnnnnnnnnnnnnnnnnnnnnnnnnnnnnnnnnnnnnnnnnnnnnnnnnnnnnnnnnnnnnnnnnnnnnnnnnnnnnnnnnnnnnnnnnnnnnnnnnnnnnnnnnnnnnnnnnnnnnnnnnnnnnnnnnnnnnnnnnnnnnnnnnnnnnnnnnnnnnnnnnnnnnnnnnnnnnnnnnnnnnnnnnnnnnnnnnnnnnnnnnnnnnnnnnnnnnnnnnnnnnnnnnnnnnnnnnnnnnnnnnnnnnnnnnnnnnnnnnnnnnnnnnnnnnnnnnnnnnnnnnnnnnnnnnnnnnnnnnnnnnnnnnnnnnnnnnnnnnnnnnnnnnnnnnnnnnnnnnnnnnnnnnnnnnnnnnnnnnnnnnnnnnnnnnnnnnnnnnnnnnnnnnnnnnnnnnnnnnnnnnnnnnnnnnnnnnnnnnnnnnnnnnnnnnnnnnnnnnnnnnnnnnnnnnnnnnnnnnnnnnnnnnnnnnnnnnnnnnnnnnnnnnnnnnnnnnnnnnnnnnnnnnnnnnnnnnnnnnnnnnnnnnnnnnnnnnnnnnnnnnnnnnnnnnnnnnnnnnnnnnnnnnnnnnnnnnnnnnnnnnnnnnnnnnnnnnnnnnnnnnnnnnnnnnnnnnnnnnnnnnnnnnnnnnnnnnnnnnnnnnnnnnnnnnnnnnnnnnnnnnnnnnnnnnnnnnnnnnnnnnnnnnnnnnnnnnnnnnnnnnnnnnnnnnnnnnnnnnnnnnnnnnnnnnnnnnnnnnnnnnnnnnnnnnnnnnnnnnnnnnnnnnnnnnnnnnnnnnnnnnnnnnnnnnnnnnnnnnnnnnnnnnnnnnnnnnnnnnnnnnnnnnnnnnnnnnnnnnnnnnnnnnnnnnnnnnnnnnnnnnnnnnnnnnnnnnnnnnnnnnnnnnnnnnnnnnnnnnnnnnnnnnnnnnnnnnnnnnnnnnnnnnnnnnnnnnnnnnnnnnnnnnnnnnnnnnnnnnnnnnnnnnnnnnnnnnnnnnnnnnnnnnnnnnnnnnnnnnnnnnnnnnnnnnnnnnnnnnnnnnnnnnnnnnnnnnnnnnnnnnnnnnnnnnnnnnnnnnnnnnnnnnnnnnnnnnnnnnnnnnnnnnnnnnnnnnnnnnnnnnnnnnnnnnnnnnnnnnnnnnnnnnnnnnnnnnnnnnnnnnnnnnnnnnnnnnnnnnnnnnnnnnnnnnnnnnnnnnnnnnnnnnnnnnnnnnnnnnnnnnnnnnnnnnnnnnnnnnnnnnnnnnnnnnnnnnnnnnnnnnnnnnnnnnnnnnnnnnnnnnnnnnnnnnnnnnnnnnnnnnnnnnnnnnnnnnnnnnnnnnnnnnnnnnnnnnnnnnnnnnnnnnnnnnnnnnnnnnnnnnnnnnnnnnnnnnnnnnnnnnnnnnnnnnnnnnnnnnnnnnnnnnnnnnnnnnnnnnnnnnnnnnnnnnnnnnnnnnnnnnnnnnnnnnnnnnnnnnnnnnnnnnnnnnnnnnnnnnnnnnnnnnnnnnnnnnnnnnnnnnnnnnnnnnnnnnnnnnnnnnnnnnnnnnnnnnnnnnnnnnnnnnnnnnnnnnnnnnnnnnnnnnnnnnnnnnnnnnnnnnnnnnnnnnnnnnnnnnnnnnnnnnnnnnnnnnnnnnnnnnnnnnnnnnnnnnnnnnnnnnnnnnnnnnnnnnnnnnnnnnnnnnnnnnnnnnnnnnnnnnnnnnnnnnnnnnnnnnnnnnnnnnnnnnnnnnnnnnnnnnnnnnnnnnnnnnnnnnnnnnnnnnnnnnnnnnnnnnnnnnnnnnnnnnnnnnnnnnnnnnnnnnnnnnnnnnnnnnnnnnnnnnnnnnnnnnnnnnnnnnnnnnnnnnnnnnnnnnnnnnnnnnnnnnnnnnnnnnnnnnnnnnnnnnnnnnnnnnnnnnnnnnnnnnnnnnnnnnnnnnnnnnnnnnnnnnnnnnnnnnnnnnnnnnnnnnnnnnnnnnnnnnnnnnnnnnnnnnnnnnnnnnnnnnnnnnnnnnnnnnnnnnnnnnnnnnnnnnnnnnnnnnnnnnnnnnnnnnnnnnnnnnnnnnnnnnnnnnnnnnnnnnnnnnnnnnnnnnnnnnnnnnnnnnnnnnnnnnnnnnnnnnnnnnnnnnnnnnnnnnnnnnnnnnnnnnnnnnnnnnnnnnnnnnnnnnnnnnnnnnnnnnnnnnnnnnnnnnnnnnnnnnnnnnnnnnnnnnnnnnnnnnnnnnnnnnnnnnnnnnnnnnnnnnnnnnnnnnnnnnnnnnnnnnnnnnnnnnnnnnnnnnnnnnnnnnnnnnnnnnnnnnnnnnnnnnnnnnnnnnnnnnnnnnnnnnnnnnnnnnnnnnnnnnnnnnnnnnnnnnnnnnnnnnnnnnnnnnnnnnnnnnnnnnnnnnnnnnnnnnnnnnnnnnnnnnnnnnnnnnnnnnnnnnnnnnnnnnnnnnnnnnnnnnnnnnnnnnnnnnnnnnnnnnnnnnnnnnnnnnnnnnnnnnnnnnnnnnnnnnnnnnnnnnnnnnnnnnnnnnnnnnnnnnnnnnnnnnnnnnnnnnnnnnnnnnnnnnnnnnnnnnnnnnnnnnnnnnnnnnnnnnnnnnnnnnnnnnnnnnnnnnnnnnnnnnnnnnnnnnnnnnnnnnnnnnnnnnnnnnnnnnnnnnnnnnnnnnnnnnnnnnnnnnnnnnnnnnnnnnnnnnnnnnnnnnnnnnnnnnnnnnnnnnnnnnnnnnnnnnnnnnnnnnnnnnnnnnnnnnnnnnnnnnnnnnnnnnnnnnnnnnnnnnnnnnnnnnnnnnnnnnnnnnnnnnnnnnnnnnnnnnnnnnnnnnnnnnnnnnnnnnnnnnnnnnnnnnnnnnnnnnnnnnnnnnnnnnnnnnnnnnnnnnnnnnnnnnnnnnnnnnnnnnnnnnnnnnnnnnnnnnnnnnnnnnnnnnnnnnnnnnnnnnnnnnnnnnnnnnnnnnnnnnnnnnnnnnnnnnnnnnnnnnnnnnnnnnnnnnnnnnnnnnnnnnnnnnnnnnnnnnnnnnnnnnnnnnnnnnnnnnnnnnnnnnnnnnnnnnnnnnnnnnnnnnnnnnnnnnnnnnnnnnnnnnnnnnnnnnnnnnnnnnnnnnnnnnnnnnnnnnnnnnnnnnnnnnnnnnnnnnnnnnnnnnnnnnnnnnnnnnnnnnnnnnnnnnnnnnnnnnnnnnnnnnnnnnnnnnnnnnnnnnnnnnnnnnnnnnnnnnnnnnnnnnnnnnnnnnnnnnnnnnnnnnnnnnnnnnnnnnnnnnnnnnnnnnnnnnnnnnnnnnnnnnnnnnnnnnnnnnnnnnnnnnnnnnnnnnnnnnnnnnnnnnnnnnnnnnnnnnnnnnnnnnnnnnnnnnnnnnnnnnnnnnnnnnnnnnnnnnnnnnnnnnnnnnnnnnnnnnnnnnnnnnnnnnnnnnnnnnnnnnnnnnnnnnnnnnnnnnnnnnnnnnnnnnnnnnnnnnnnnnnnnnnnnnnnnnnnnnnnnnnnnnnnnnnnnnnnnnnnnnnnnnnnnnnnnnnnnnnnnnnnnnnnnnnnnnnnnnnnnnnnnnnnnnnnnnnnnnnnnnnnnnnnnnnnnnnnnnnnnnnnnnnnnnnnnnnnnnnnnnnnnnnnnnnnnnnnnnnnnnnnnnnnnnnnnnnnnnnnnnnnnnnnnnnnnnnnnnnnnnnnnnnnnnnnnnnnnnnnnnnnnnnnnnnnnnnnnnnnnnnnnnnnnnnnnnnnnnnnnnnnnnnnnnnnnnnnnnnnnnnnnnnnnnnnnnnnnnnnnnnnnnnnnnnnnnnnnnnnnnnnnnnnnnnnnnnnnnnnnnnnnnnnnnnnnnnnnnnnnnnnnnnnnnnnnnnnnnnnnnnnnnnnnnnnnnnnnnnnnnnnnnnnnnnnnnnnnnnnnnnnnnnnnnnnnnnnnnnnnnnnnnnnnnnnnnnnnnnnnnnnnnnnnnnnnnnnnnnnnnnnnnnnnnnnnnnnnnnnnnnnnnnnnnnnnnnnnnnnnnnnnnnnnnnnnnnnnnnnnnnnnnnnnnnnnnnnnnnnnnnnnnnnnnnnnnnnnnnnnnnnnnnnnnnnnnnnnnnnnnnnnnnnnnnnnnnnnnnnnnnnnnnnnnnnnnnnnnnnnnnnnnnnnnnnnnnnnnnnnnnnnnnnnnnnnnnnnnnnnnnnnnnnnnnnnnnnnnnnnnnnnnnnnnnnnnnnnnnnnnnnnnnnnnnnnnnnnnnnnnnnnnnnnnnnnnnnnnnnnnnnnnnnnnnnnnnnnnnnnnnnnnnnnnnnnnnnnnnnnnnnnnnnnnnnnnnnnnnnnnnnnnnnnnnnnnnnnnnnnnnnnnnnnnnnnnnnnnnnnnnnnnnnnnnnnnnnnnnnnnnnnnnnnnnnnnnnnnnnnnnnnnnnnnnnnnnnnnnnnnnnnnnnnnnnnnnnnnnnnnnnnnnnnnnnnnnnnnnnnnnnnnnnnnnnnnnnnnnnnnnnnnnnnnnnnnnnnnnnnnnnnnnnnnnnnnnnnnnnnnnnnnnnnnnnnnnnnnnnnnnnnnnnnnnnnnnnnnnnnnnnnnnnnnnnnnnnnnnnnnnnnnnnnnnnnnnnnnnnnnnnnnnnnnnnnnnnnnnnnnnnnnnnnnnnnnnnnnnnnnnnnnnnnnnnnnnnnnnnnnnnnnnnnnnnnnnnnnnnnnnnnnnnnnnnnnnnnnnnnnnnnnnnnnnnnnnnnnnnnnnnnnnnnnnnnnnnnnnnnnnnnnnnnnnnnnnnnnnnnnnnnnnnnnnnnnnnnnnnnnnnnnnnnnnnnnnnnnnnnnnnnnnnnnnnnnnnnnnnnnnnnnnnnnnnnnnnnnnnnnnnnnnnnnnnnnnnnnnnnnnnnnnnnnnnnnnnnnnnnnnnnnnnnnnnnnnnnnnnnnnnnnnnnnnnnnnnnnnnnnnnnnnnnnnnnnnnnnnnnnnnnnnnnnnnnnnnnnnnnnnnnnnnnnnnnnnnnnnnnnnnnnnnnnnnnnnnnnnnnnnnnnnnnnnnnnnnnnnnnnnnnnnnnnnnnnnnnnnnnnnnnnnnnnnnnnnnnnnnnnnnnnnnnnnnnnnnnnnnnnnnnnnnnnnnnnnnnnnnnnnnnnnnnnnnnnnnnnnnnnnnnnnnnnnnnnnnnnnnnnnnnnnnnnnnnnnnnnnnnnnnnnnnnnnnnnnnnnnnnnnnnnnnnnnnnnnnnnnnnnnnnnnnnnnnnnnnnnnnnnnnnnnnnnnnnnnnnnnnnnnnnnnnnnnnnnnnnnnnnnnnnnnnnnnnnnnnnnnnnnnnnnnnnnnnnnnnnnnnnnnnnnnnnnnnnnnnnnnnnnnnnnnnnnnnnnnnnnnnnnnnnnnnnnnnnnnnnnnnnnnnnnnnnnnnnnnnnnnnnnnnnnnnnnnnnnnnnnnnnnnnnnnnnnnnnnnnnnnnnnnnnnnnnnnnnnnnnnnnnnnnnnnnnnnnnnnnnnnnnnnnnnnnnnnnnnnnnnnnnnnnnnnnnnnnnnnnnnnnnnnnnnnnnnnnnnnnnnnnnnnnnnnnnnnnnnnnnnnnnnnnnnnnnnnnnnnnnnnnnnnnnnnnnnnnnnnnnnnnnnnnnnnnnnnnnnnnnnnnnnnnnnnnnnnnnnnnnnnnnnnnnnnnnnnnnnnnnnnnnnnnnnnnnnnnnnnnnnnnnnnnnnnnnnnnnnnnnnnnnnnnnnnnnnnnnnnnnnnnnnnnnnnnnnnnnnnnnnnnnnnnnnnnnnnnnnnnnnnnnnnnnnnnnnnnnnnnnnnnnnnnnnnnnnnnnnnnnnnnnnnnnnnnnnnnnnnnnnnnnnnnnnnnnnnnnnnnnnnnnnnnnnnnnnnnnnnnnnnnnnnnnnnnnnnnnnnnnnnnnnnnnnnnnnnnnnnnnnnnnnnnnnnnnnnnnnnnnnnnnnnnnnnnnnnnnnnnnnnnnnnnnnnnnnnnnnnnnnnnnnnnnnnnnnnnnnnnnnnnnnnnnnnnnnnnnnnnnnnnnnnnnnnnnnnnnnnnnnnnnnnnnnnnnnnnnnnnnnnnnnnnnnnnnnnnnnnnnnnnnnnnnnnnnnnnnnnnnnnnnnnnnnnnnnnnnnnnnnnnnnnnnnnnnnnnnnnnnnnnnnnnnnnnnnnnnnnnnnnnnnnnnnnnnnnnnnnnnnnnnnnnnnnnnnnnnnnnnnnnnnnnnnnnnnnnnnnnnnnnnnnnnnnnnnnnnnnnnnnnnnnnnnnnnnnnnnnnnnnnnnnnnnnnnnnnnnnnnnnnnnnnnnnnnnnnnnnnnnnnnnnnnnnnnnnnnnnnnnnnnnnnnnnnnnnnnnnnnnnnnnnnnnnnnnnnnnnnnnnnnnnnnnnnnnnnnnnnnnnnnnnnnnnnnnnnnnnnnnnnnnnnnnnnnnnnnnnnnnnnnnnnnnnnnnnnnnnnnnnnnnnnnnnnnnnnnnnnnnnnnnnnnnnnnnnnnnnnnnnnnnnnnnnnnnnnnnnnnnnnnnnnnnnnnnnnnnnnnnnnnnnnnnnnnnnnnnnnnnnnnnnnnnnnnnnnnnnnnnnnnnnnnnnnnnnnnnnnnnnnnnnnnnnnnnnnnnnnnnnnnnnnnnnnnnnnnnnnnnnnnnnnnnnnnnnnnnnnnnnnnnnnnnnnnnnnnnnnnnnnnnnnnnnnnnnnnnnnnnnnnnnnnnnnnnnnnnnnnnnnnnnnnnnnnnnnnnnnnnnnnnnnnnnnnnnnnnnnnnnnnnnnnnnnnnnnnnnnnnnnnnnnnnnnnnnnnnnnnnnnnnnnnnnnnnnnnnnnnnnnnnnnnnnnnnnnnnnnnnnnnnnnnnnnnnnnnnnnnnnnnnnnnnnnnnnnnnnnnnnnnnnnnnnnnnnnnnnnnnnnnnnnnnnnnnnnnnnnnnnnnnnnnnnnnnnnnnnnnnnnnnnnnnnnnnnnnnnnnnnnnnnnnnnnnnnnnnnnnnnnnnnnnnnnnnnnnnnnnnnnnnnnnnnnnnnnnnnnnnnnnnnnnnnnnnnnnnnnnnnnnnnnnnnnnnnnnnnnnnnnnnnnnnnnnnnnnnnnnnnnnnnnnnnnnnnnnnnnnnnnnnnnnnnnnnnnnnnnnnnnnnnnnnnnnnnnnnnnnnnnnnnnnnnnnnnnnnnnnnnnnnnnnnnnnnnnnnnnnnnnnnnnnnnnnnnnnnnnnnnnnnnnnnnnnnnnnnnnnnnnnnnnnnnnnnnnnnnnnnnnnnnnnnnnnnnnnnnnnnnnnnnnnnnnnnnnnnnnnnnnnnnnnnnnnnnnnnnnnnnnnnnnnnnnnnnnnnnnnnnnnnnnnnnnnnnnnnnnnnnnnnnnnnnnnnnnnnnnnnnnnnnnnnnnnnnnnnnnnnnnnnnnnnnnnnnnnnnnnnnnnnnnnnnnnnnnnnnnnnnnnnnnnnnnnnnnnnnnnnnnnnnnnnnnnnnnnnnnnnnnnnnnnnnnnnnnnnnnnnnnnnnnnnnnnnnnnnnnnnnnnnnnnnnnnnnnnnnnnnnnnnnnnnnnnnnnnnnnnnnnnnnnnnnnnnnnnnnnnnnnnnnnnnnnnnnnnnnnnnnnnnnnnnnnnnnnnnnnnnnnnnnnnnnnnnnnnnnnnnnnnnnnnnnnnnnnnnnnnnnnnnnnnnnnnnnnnnnnnnnnnnnnnnnnnnnnnnnnnnnnnnnnnnnnnnnnnnnnnnnnnnnnnnnnnnnnnnnnnnnnnnnnnnnnnnnnnnnnnnnnnnnnnnnnnnnnnnnnnnnnnnnnnnnnnnnnnnnnnnnnnnnnnnnnnnnnnnnnnnnnnnnnnnnnnnnnnnnnnnnnnnnnnnnnnnnnnnnnnnnnnnnnnnnnnnnnnnnnnnnnnnnnnnnnnnnnnnnnnnnnnnnnnnnnnnnnnnnnnnnnnnnnnnnnnnnnnnnnnnnnnnnnnnnnnnnnnnnnnnnnnnnnnnnnnnnnnnnnnnnnnnnnnnnnnnnnnnnnnnnnnnnnnnnnnnnnnnnnnnnnnnnnnnnnnnnnnnnnnnnnnnnnnnnnnnnnnnnnnnnnnnnnnnnnnnnnnnnnnnnnnnnnnnnnnnnnnnnnnnnnnnnnnnnnnnnnnnnnnnnnnnnnnnnnnnnnnnnnnnnnnnnnnnnnnnnnnnnnnnnnnnnnnnnnnnnnnnnnnnnnnnnnnnnnnnnnnnnnnnnnnnnnnnnnnnnnnnnnnnnnnnnnnnnnnnnnnnnnnnnnnnnnnnnnnnnnnnnnnnnnnnnnnnnnnnnnnnnnnnnnnnnnnnnnnnnnnnnnnnnnnnnnnnnnnnnnnnnnnnnnnnnnnnnnnnnnnnnnnnnnnnnnnnnnnnnnnnnnnnnnnnnnnnnnnnnnnnnnnnnnnnnnnnnnnnnnnnnnnnnnnnnnnnnnnnnnnnnnnnnnnnnnnnnnnnnnnnnnnnnnnnnnnnnnnnnnnnnnnnnnnnnnnnnnnnnnnnnnnnnnnnnnnnnnnnnnnnnnnnnnnnnnnnnnnnnnnnnnnnnnnnnnnnnnnnnnnnnnnnnnnnnnnnnnnnnnnnnnnnnnnnnnnnnnnnnnnnnnnnnnnnnnnnnnnnnnnnnnnnnnnnnnnnnnnnnnnnnnnnnnnnnnnnnnnnnnnnnnnnnnnnnnnnnnnnnnnnnnnnnnnnnnnnnnnnnnnnnnnnnnnnnnnnnnnnnnnnnnnnnnnnnnnnnnnnnnnnnnnnnnnnnnnnnnnnnnnnnnnnnnnnnnnnnnnnnnnnnnnnnnnnnnnnnnnnnnnnnnnnnnnnnnnnnnnnnnnnnnnnnnnnnnnnnnnnnnnnnnnnnnnnnnnnnnnnnnnnnnnnnnnnnnnnnnnnnnnnnnnnnnnnnnnnnnnnnnnnnnnnnnnnnnnnnnnnnnnnnnnnnnnnnnnnnnnnnnnnnnnnnnnnnnnnnnnnnnnnnnnnnnnnnnnnnnnnnnnnnnnnnnnnnnnnnnnnnnnnnnnnnnnnnnnnnnnnnnnnnnnnnnnnnnnnnnnnnnnnnnnnnnnnnnnnnnnnnnnnnnnnnnnnnnnnnnnnnnnnnnnnnnnnnnnnnnnnnnnnnnnnnnnnnnnnnnnnnnnnnnnnnnnnnnnnnnnnnnnnnnnnnnnnnnnnnnnnnnnnnnnnnnnnnnnnnnnnnnnnnnnnnnnnnnnnnnnnnnnnnnnnnnnnnnnnnnnnnnnnnnnnnnnnnnnnnnnnnnnnnnnnnnnnnnnnnnnnnnnnnnnnnnnnnnnnnnnnnnnnnnnnnnnnnnnnnnnnnnnnnnnnnnnnnnnnnnnnnnnnnnnnnnnnnnnnnnnnnnnnnnnnnnnnnnnnnnnnnnnnnnnnnnnnnnnnnnnnnnnnnnnnnnnnnnnnnnnnnnnnnnnnnnnnnnnnnnnnnnnnnnnnnnnnnnnnnnnnnnnnnnnnnnnnnnnnnnnnnnnnnnnnnnnnnnnnnnnnnnnnnnnnnnnnnnnnnnnnnnnnnnnnnnnnnnnnnnnnnnnnnnnnnnnnnnnnnnnnnnnnnnnnnnnnnnnnnnnnnnnnnnnnnnnnnnnnnnnnnnnnnnnnnnnnnnnnnnnnnnnnnnnnnnnnnnnnnnnnnnnnnnnnnnnnnnnnnnnnnnnnnnnnnnnnnnnnnnnnnnnnnnnnnnnnnnnnnnnnnnnnnnnnnnnnnnnnnnnnnnnnnnnnnnnnnnnnnnnnnnnnnnnnnnnnnnnnnnnnnnnnnnnnnnnnnnnnnnnnnnnnnnnnnnnnnnnnnnnnnnnnnnnnnnnnnnnnnnnnnnnnnnnnnnnnnnnnnnnnnnnnnnnnnnnnnnnnnnnnnnnnnnnnnnnnnnnnnnnnnnnnnnnnnnnnnnnnnnnnnnnnnnnnnnnnnnnnnnnnnnnnnnnnnnnnnnnnnnnnnnnnnnnnnnnnnnnnnnnnnnnnnnnnnnnnnnnnnnnnnnnnnnnnnnnnnnnnnnnnnnnnnnnnnnnnnnnnnnnnnnnnnnnnnnnnnnnnnnnnnnnnnnnnnnnnnnnnnnnnnnnnnnnnnnnnnnnnnnnnnnnnnnnnnnnnnnnnnnnnnnnnnnnnnnnnnnnnnnnnnnnnnnnnnnnnnnnnnnnnnnnnnnnnnnnnnnnnnnnnnnnnnnnnnnnnnnnnnnnnnnnnnnnnnnnnnnnnnnnnnnnnnnnnnnnnnnnnnnnnnnnnnnnnnnnnnnnnnnnnnnnnnnnnnnnnnnnnnnnnnnnnnnnnnnnnnnnnnnnnnnnnnnnnnnnnnnnnnnnnnnnnnnnnnnnnnnnnnnnnnnnnnnnnnnnnnnnnnnnnnnnnnnnnnnnnnnnnnnnnnnnnnnnnnnnnnnnnnnnnnnnnnnnnnnnnnnnnnnnnnnnnnnnnnnnnnnnnnnnnnnnnnnnnnnnnnnnnnnnnnnnnnnnnnnnnnnnnnnnnnnnnnnnnnnnnnnnnnnnnnnnnnnnnnnnnnnnnnnnnnnnnnnnnnnnnnnnnnnnnnnnnnnnnnnnnnnnnnnnnnnnnnnnnnnnnnnnnnnnnnnnnnnnnnnnnnnnnnnnnnnnnnnnnnnnnnnnnnnnnnnnnnnnnnnnnnnnnnnnnnnnnnnnnnnnnnnnnnnnnnnnnnnnnnnnnnnnnnnnnnnnnnnnnnnnnnnnnnnnnnnnnnnnnnnnnnnnnnnnnnnnnnnnnnnnnnnnnnnnnnnnnnnnnnnnnnnnnnnnnnnnnnnnnnnnnnnnnnnnnnnnnnnnnnnnnnnnnnnnnnnnnnnnnnnnnnnnnnnnnnnnnnnnnnnnnnnnnnnnnnnnnnnnnnnnnnnnnnnnnnnnnnnnnnnnnnnnnnnnnnnnnnnnnnnnnnnnnnnnnnnnnnnnnnnnnnnnnnnnnnnnnnnnnnnnnnnnnnnnnnnnnnnnnnnnnnnnnnnnnnnnnnnnnnnnnnnnnnnnnnnnnnnnnnnnnnnnnnnnnnnnnnnnnnnnnnnnnnnnnnnnnnnnnnnnnnnnnnnnnnnnnnnnnnnnnnnnnnnnnnnnnnnnnnnnnnnnnnnnnnnnnnnnnnnnnnnnnnnnnnnnnnnnnnnnnnnnnnnnnnnnnnnnnnnnnnnnnnnnnnnnnnnnnnnnnnnnnnnnnnnnnnnnnnnnnnnnnnnnnnnnnnnnnnnnnnnnnnnnnnnnnnnnnnnnnnnnnnnnnnnnnnnnnnnnnnnnnnnnnnnnnnnnnnnnnnnnnnnnnnnnnnnnnnnnnnnnnnnnnnnnnnnnnnnnnnnnnnnnnnnnnnnnnnnnnnnnnnnnnnnnnnnnnnnnnnnnnnnnnnnnnnnnnnnnnnnnnnnnnnnnnnnnnnnnnnnnnnnnnnnnnnnnnnnnnnnnnnnnnnnnnnnnnnnnnnnnnnnnnnnnnnnnnnnnnnnnnnnnnnnnnnnnnnnnnnnnnnnnnnnnnnnnnnnnnnnnnnnnnnnnnnnnnnnnnnnnnnnnnnnnnnnnnnnnnnnnnnnnnnnnnnnnnnnnnnnnnnnnnnnnnnnnnnnnnnnnnnnnnnnnnnnnnnnnnnnnnnnnnnnnnnnnnnnnnnnnnnnnnnnnnnnnnnnnnnnnnnnnnnnnnnnnnnnnnnnnnnnnnnnnnnnnnnnnnnnnnnnnnnnnnnnnnnnnnnnnnnnnnnnnnnnnnnnnnnnnnnnnnnnnnnnnnnnnnnnnnnnnnnnnnnnnnnnnnnnnnnnnnnnnnnnnnnnnnnnnnnnnnnnnnnnnnnnnnnnnnnnnnnnnnnnnnnnnnnnnnnnnnnnnnnnnnnnnnnnnnnnnnnnnnnnnnnnnnnnnnnnnnnnnnnnnnnnnnnnnnnnnnnnnnnnnnnnnnnnnnnnnnnnnnnnnnnnnnnnnnnnnnnnnnnnnnnnnnnnnnnnnnnnnnnnnnnnnnnnnnnnnnnnnnnnnnnnnnnnnnnnnnnnnnnnnnnnnnnnnnnnnnnnnnnnnnnnnnnnnnnnnnnnnnnnnnnnnnnnnnnnnnnnnnnnnnnnnnnnnnnnnnnnnnnnnnnnnnnnnnnnnnnnnnnnnnnnnnnnnnnnnnnnnnnnnnnnnnnnnnnnnnnnnnnnnnnnnnnnnnnnnnnnnnnnnnnnnnnnnnnnnnnnnnnnnnnnnnnnnnnnnnnnnnnnnnnnnnnnnnnnnnnnnnnnnnnnnnnnnnnnnnnnnnnnnnnnnnnnnnnnnnnnnnnnnnnnnnnnnnnnnnnnnnnnnnnnnnnnnnnnnnnnnnnnnnnnnnnnnnnnnnnnnnnnnnnnnnnnnnnnnnnnnnnnnnnnnnnnnnnnnnnnnnnnnnnnnnnnnnnnnnnnnnnnnnnnnnnnnnnnnnnnnnnnnnnnnnnnnnnnnnnnnnnnnnnnnnnnnnnnnnnnnnnnnnnnnnnnnnnnnnnnnnnnnnnnnnnnnnnnnnnnnnnnnnnnnnnnnnnnnnnnnnnnnnnnnnnnnnnnnnnnnnnnnnnnnnnnnnnnnnnnnnnnnnnnnnnnnnnnnnnnnnnnnnnnnnnnnnnnnnnnnnnnnnnnnnnnnnnnnnnnnnnnnnnnnnnnnnnnnnnnnnnnnnnnnnnnnnnnnnnnnnnnnnnnnnnnnnnnnnnnnnnnnnnnnnnnnnnnnnnnnnnnnnnnnnnnnnnnnnnnnnnnnnnnnnnnnnnnnnnnnnnnnnnnnnnnnnnnnnnnnnnnnnnnnnnnnnnnnnnnnnnnnnnnnnnnnnnnnnnnnnnnnnnnnnnnnnnnnnnnnnnnnnnnnnnnnnnnnnnnnnnnnnnnnnnnnnnnnnnnnnnnnnnnnnnnnnnnnnnnnnnnnnnnnnnnnnnnnnnnnnnnnnnnnnnnnnnnnnnnnnnnnnnnnnnnnnnnnnnnnnnnnnnnnnnnnnnnnnnnnnnnnnnnnnnnnnnnnnnnnnnnnnnnnnnnnnnnnnnnnnnnnnnnnnnnnnnnnnnnnnnnnnnnnnnnnnnnnnnnnnnnnnnnnnnnnnnnnnnnnnnnnnnnnnnnnnnnnnnnnnnnnnnnnnnnnnnnnnnnnnnnnnnnnnnnnnnnnnnnnnnnnnnnnnnnnnnnnnnnnnnnnnnnnnnnnnnnnnnnnnnnnnnnnnnnnnnnnnnnnnnnnnnnnnnnnnnnnnnnnnnnnnnnnnnnnnnnnnnnnnnnnnnnnnnnnnnnnnnnnnnnnnnnnnnnnnnnnnnnnnnnnnnnnnnnnnnnnnnnnnnnnnnnnnnnnnnnnnnnnnnnnnnnnnnnnnnnnnnnnnnnnnnnnnnnnnnnnnnnnnnnnnnnnnnnnnnnnnnnnnnnnnnnnnnnnnnnnnnnnnnnnnnnnnnnnnnnnnnnnnnnnnnnnnnnnnnnnnnnnnnnnnnnnnnnnnnnnnnnnnnnnnnnnnnnnnnnnnnnnnnnnnnnnnnnnnnnnnnnnnnnnnnnnnnnnnnnnnnnnnnnnnnnnnnnnnnnnnnnnnnnnnnnnnnnnnnnnnnnnnnnnnnnnnnnnnnnnnnnnnnnnnnnnnnnnnnnnnnnnnnnnnnnnnnnnnnnnnnnnnnnnnnnnnnnnnnnnnnnnnnnnnnnnnnnnnnnnnnnnnnnnnnnnnnnnnnnnnnnnnnnnnnnnnnnnnnnnnnnnnnnnnnnnnnnnnnnnnnnnnnnnnnnnnnnnnnnnnnnnnnnnnnnnnnnnnnnnnnnnnnnnnnnnnnnnnnnnnnnnnnnnnnnnnnnnnnnnnnnnnnnnnnnnnnnnnnnnnnnnnnnnnnnnnnnnnnnnnnnnnnnnnnnnnnnnnnnnnnnnnnnnnnnnnnnnnnnnnnnnnnnnnnnnnnnnnnnnnnnnnnnnnnnnnnnnnnnnnnnnnnnnnnnnnnnnnnnnnnnnnnnnnnnnnnnnnnnnnnnnnnnnnnnnnnnnnnnnnnnnnnnnnnnnnnnnnnnnnnnnnnnnnnnnnnnnnnnnnnnnnnnnnnnnnnnnnnnnnnnnnnnnnnnnnnnnnnnnnnnnnnnnnnnnnnnnnnnnnnnnnnnnnnnnnnnnnnnnnnnnnnnnnnnnnnnnnnnnnnnnnnnnnnnnnnnnnnnnnnnnnnnnnnnnnnnnnnnnnnnnnnnnnnnnnnnnnnnnnnnnnnnnnnnnnnnnnnnnnnnnnnnnnnnnnnnnnnnnnnnnnnnnnnnnnnnnnnnnnnnnnnnnnnnnnnnnnnnnnnnnnnnnnnnnnnnnnnnnnnnnnnnnnnnnnnnnnnnnnnnnnnnnnnnnnnnnnnnnnnnnnnnnnnnnnnnnnnnnnnnnnnnnnnnnnnnnnnnnnnnnnnnnnnnnnnnnnnnnnnnnnnnnnnnnnnnnnnnnnnnnnnnnnnnnnnnnnnnnnnnnnnnnnnnnnnnnnnnnnnnnnnnnnnnnnnnnnnnnnnnnnnnnnnnnnnnnnnnnnnnnnnnnnnnnnnnnnnnnnnnnnnnnnnnnnnnnnnnnnnnnnnnnnnnnnnnnnnnnnnnnnnnnnnnnnnnnnnnnnnnnnnnnnnnnnnnnnnnnnnnnnnnnnnnnnnnnnnnnnnnnnnnnnnnnnnnnnnnnnnnnnnnnnnnnnnnnnnnnnnnnnnnnnnnnnnnnnnnnnnnnnnnnnnnnnnnnnnnnnnnnnnnnnnnnnnnnnnnnnnnnnnnnnnnnnnnnnnnnnnnnnnnnnnnnnnnnnnnnnnnnnnnnnnnnnnnnnnnnnnnnnnnnnnnnnnnnnnnnnnnnnnnnnnnnnnnnnnnnnnnnnnnnnnnnnnnnnnnnnnnnnnnnnnnnnnnnnnnnnnnnnnnnnnnnnnnnnnnnnnnnnnnnnnnnnnnnnnnnnnnnnnnnnnnnnnnnnnnnnnnnnnnnnnnnnnnnnnnnnnnnnnnnnnnnnnnnnnnnnnnnnnnnnnnnnnnnnnnnnnnnnnnnnnnnnnnnnnnnnnnnnnnnnnnnnnnnnnnnnnnnnnnnnnnnnnnnnnnnnnnnnnnnnnnnnnnnnnnnnnnnnnnnnnnnnnnnnnnnnnnnnnnnnnnnnnnnnnnnnnnnnnnnnnnnnnnnnnnnnnnnnnnnnnnnnnnnnnnnnnnnnnnnnnnnnnnnnnnnnnnnnnnnnnnnnnnnnnnnnnnnnnnnnnnnnnnnnnnnnnnnnnnnnnnnnnnnnnnnnnnnnnnnnnnnnnnnnnnnnnnnnnnnnnnnnnnnnnnnnnnnnnnnnnnnnnnnnnnnnnnnnnnnnnnnnnnnnnnnnnnnnnnnnnnnnnnnnnnnnnnnnnnnnnnnnnnnnnnnnnnnnnnnnnnnnnnnnnnnnnnnnnnnnnnnnnnnnnnnnnnnnnnnnnnnnnnnnnnnnnnnnnnnnnnnnnnnnnnnnnnnnnnnnnnnnnnnnnnnnnnnnnnnnnnnnnnnnnnnnnnnnnnnnnnnnnnnnnnnnnnnnnnnnnnnnnnnnnnnnnnnnnnnnnnnnnnnnnnnnnnnnnnnnnnnnnnnnnnnnnnnnnnnnnnnnnnnnnnnnnnnnnnnnnnnnnnnnnnnnnnnnnnnnnnnnnnnnnnnnnnnnnnnnnnnnnnnnnnnnnnnnnnnnnnnnnnnnnnnnnnnnnnnnnnnnnnnnnnnnnnnnnnnnnnnnnnnnnnnnnnnnnnnnnnnnnnnnnnnnnnnnnnnnnnnnnnnnnnnnnnnnnnnnnnnnnnnnnnnnnnnnnnnnnnnnnnnnnnnnnnnnnnnnnnnnnnnnnnnnnnnnnnnnnnnnnnnnnnnnnnnnnnnnnnnnnnnnnnnnnnnnnnnnnnnnnnnnnnnnnnnnnnnnnnnnnnnnnnnnnnnnnnnnnnnnnnnnnnnnnnnnnnnnnnnnnnnnnnnnnnnnnnnnnnnnnnnnnnnnnnnnnnnnnnnnnnnnnnnnnnnnnnnnnnnnnnnnnnnnnnnnnnnnnnnnnnnnnnnnnnnnnnnnnnnnnnnnnnnnnnnnnnnnnnnnnnnnnnnnnnnnnnnnnnnnnnnnnnnnnnnnnnnnnnnnnnnnnnnnnnnnnnnnnnnnnnnnnnnnnnnnnnnnnnnnnnnnnnnnnnnnnnnnnnnnnnnnnnnnnnnnnnnnnnnnnnnnnnnnnnnnnnnnnnnnnnnnnnnnnnnnnnnnnnnnnnnnnnnnnnnnnnnnnnnnnnnnnnnnnnnnnnnnnnnnnnnnnnnnnnnnnnnnnnnnnnnnnnnnnnnnnnnnnnnnnnnnnnnnnnnnnnnnnnnnnnnnnnnnnnnnnnnnnnnnnnnnnnnnnnnnnnnnnnnnnnnnnnnnnnnnnnnnnnnnnnnnnnnnnnnnnnnnnnnnnnnnnnnnnnnnnnnnnnnnnnnnnnnnnnnnnnnnnnnnnnnnnnnnnnnnnnnnnnnnnnnnnnnnnnnnnnnnnnnnnnnnnnnnnnnnnnnnnnnnnnnnnnnnnnnnnnnnnnnnnnnnnnnnnnnnnnnnnnnnnnnnnnnnnnnnnnnnnnnnnnnnnnnnnnnnnnnnnnnnnnnnnnnnnnnnnnnnnnnnnnnnnnnnnnnnnnnnnnnnnnnnnnnnnnnnnnnnnnnnnnnnnnnnnnnnnnnnnnnnnnnnnnnnnnnnnnnnnnnnnnnnnnnnnnnnnnnnnnnnnnnnnnnnnnnnnnnnnnnnnnnnnnnnnnnnnnnnnnnnnnnnnnnnnnnnnnnnnnnnnnnnnnnnnnnnnnnnnnnnnnnnnnnnnnnnnnnnnnnnnnnnnnnnnnnnnnnnnnnnnnnnnnnnnnnnnnnnnnnnnnnnnnnnnnnnnnnnnnnnnnnnnnnnnnnnnnnnnnnnnnnnnnnnnnnnnnnnnnnnnnnnnnnnnnnnnnnnnnnnnnnnnnnnnnnnnnnnnnnnnnnnnnnnnnnnnnnnnnnnnnnnnnnnnnnnnnnnnnnnnnnnnnnnnnnnnnnnnnnnnnnnnnnnnnnnnnnnnnnnnnnnnnnnnnnnnnnnnnnnnnnnnnnnnnnnnnnnnnnnnnnnnnnnnnnnnnnnnnnnnnnnnnnnnnnnnnnnnnnnnnnnnnnnnnnnnnnnnnnnnnnnnnnnnnnnnnnnnnnnnnnnnnnnnnnnnnnnnnnnnnnnnnnnnnnnnnnnnnnnnnnnnnnnnnnnnnnnnnnnnnnnnnnnnnnnnnnnnnnnnnnnnnnnnnnnnnnnnnnnnnnnnnnnnnnnnnnnnnnnnnnnnnnnnnnnnnnnnnnnnnnnnnnnnnnnnnnnnnnnnnnnnnnnnnnnnnnnnnnnnnnnnnnnnnnnnnnnnnnnnnnnnnnnnnnnnnnnnnnnnnnnnnnnnnnnnnnnnnnnnnnnnnnnnnnnnnnnnnnnnnnnnnnnnnnnnnnnnnnnnnnnnnnnnnnnnnnnnnnnnnnnnnnnnnnnnnnnnnnnnnnnnnnnnnnnnnnnnnnnnnnnnnnnnnnnnnnnnnnnnnnnnnnnnnnnnnnnnnnnnnnnnnnnnnnnnnnnnnnnnnnnnnnnnnnnnnnnnnnnnnnnnnnnnnnnnnnnnnnnnnnnnnnnnnnnnnnnnnnnnnnnnnnnnnnnnnnnnnnnnnnnnnnnnnnnnnnnnnnnnnnnnnnnnnnnnnnnnnnnnnnnnnnnnnnnnnnnnnnnnnnnnnnnnnnnnnnnnnnnnnnnnnnnnnnnnnnnnnnnnnnnnnnnnnnnnnnnnnnnnnnnnnnnnnnnnnnnnnnnnnnnnnnnnnnnnnnnnnnnnnnnnnnnnnnnnnnnnnnnnnnnnnnnnnnnnnnnnnnnnnnnnnnnnnnnnnnnnnnnnnnnnnnnnnnnnnnnnnnnnnnnnnnnnnnnnnnnnnnnnnnnnnnnnnnnnnnnnnnnnnnnnnnnnnnnnnnnnnnnnnnnnnnnnnnnnnnnnnnnnnnnnnnnnnnnnnnnnnnnnnnnnnnnnnnnnnnnnnnnnnnnnnnnnnnnnnnnnnnnnnnnnnnnnnnnnnnnnnnnnnnnnnnnnnnnnnnnnnnnnnnnnnnnnnnnnnnnnnnnnnnnnnnnnnnnnnnnnnnnnnnnnnnnnnnnnnnnnnnnnnnnnnnnnnnnnnnnnnnnnnnnnnnnnnnnnnnnnnnnnnnnnnnnnnnnnnnnnnnnnnnnnnnnnnnnnnnnnnnnnnnnnnnnnnnnnnnnnnnnnnnnnnnnnnnnnnnnnnnnnnnnnnnnnnnnnnnnnnnnnnnnnnnnnnnnnnnnnnnnnnnnnnnnnnnnnnnnnnnnnnnnnnnnnnnnnnnnnnnnnnnnnnnnnnnnnnnnnnnnnnnnnnnnnnnnnnnnnnnnnnnnnnnnnnnnnnnnnnnnnnnnnnnnnnnnnnnnnnnnnnnnnnnnnnnnnnnnnnnnnnnnnnnnnnnnnnnnnnnnnnnnnnnnnnnnnnnnnnnnnnnnnnnnnnnnnnnnnnnnnnnnnnnnnnnnnnnnnnnnnnnnnnnnnnnnnnnnnnnnnnnnnnnnnnnnnnnnnnnnnnnnnnnnnnnnnnnnnnnnnnnnnnnnnnnnnnnnnnnnnnnnnnnnnnnnnnnnnnnnnnnnnnnnnnnnnnnnnnnnnnnnnnnnnnnnnnnnnnnnnnnnnnnnnnnnnnnnnnnnnnnnnnnnnnnnnnnnnnnnnnnnnnnnnnnnnnnnnnnnnnnnnnnnnnnnnnnnnnnnnnnnnnnnnnnnnnnnnnnnnnnnnnnnnnnnnnnnnnnnnnnnnnnnnnnnnnnnnnnnnnnnnnnnnnnnnnnnnnnnnnnnnnnnnnnnnnnnnnnnnnnnnnnnnnnnnnnnnnnnnnnnnnnnnnnnnnnnnnnnnnnnnnnnnnnnnnnnnnnnnnnnnnnnnnnnnnnnnnnnnnnnnnnnnnnnnnnnnnnnnnnnnnnnnnnnnnnnnnnnnnnnnnnnnnnnnnnnnnnnnnnnnnnnnnnnnnnnnnnnnnnnnnnnnnnnnnnnnnnnnnnnnnnnnnnnnnnnnnnnnnnnnnnnnnnnnnnnnnnnnnnnnnnnnnnnnnnnnnnnnnnnnnnnnnnnnnnnnnnnnnnnnnnnnnnnnnnnnnnnnnnnnnnnnnnnnnnnnnnnnnnnnnnnnnnnnnnnnnnnnnnnnnnnnnnnnnnnnnnnnnnnnnnnnnnnnnnnnnnnnnnnnnnnnnnnnnnnnnnnnnnnnnnnnnnnnnnnnnnnnnnnnnnnnnnnnnnnnnnnnnnnnnnnnnnnnnnnnnnnnnnnnnnnnnnnnnnnnnnnnnnnnnnnnnnnnnnnnnnnnnnnnnnnnnnnnnnnnnnnnnnnnnnnnnnnnnnnnnnnnnnnnnnnnnnnnnnnnnnnnnnnnnnnnnnnnnnnnnnnnnnnnnnnnnnnnnnnnnnnnnnnnnnnnnnnnnnnnnnnnnnnnnnnnnnnnnnnnnnnnnnnnnnnnnnnnnnnnnnnnnnnnnnnnnnnnnnnnnnnnnnnnnnnnnnnnnnnnnnnnnnnnnnnnnnnnnnnnnnnnnnnnnnnnnnnnnnnnnnnnnnnnnnnnnnnnnnnnnnnnnnnnnnnnnnnnnnnnnnnnnnnnnnnnnnnnnnnnnnnnnnnnnnnnnnnnnnnnnnnnnnnnnnnnnnnnnnnnnnnnnnnnnnnnnnnnnnnnnnnnnnnnnnnnnnnnnnnnnnnnnnnnnnnnnnnnnnnnnnnnnnnnnnnnnnnnnnnnnnnnnnnnnnnnnnnnnnnnnnnnnnnnnnnnnnnnnnnnnnnnnnnnnnnnnnnnnnnnnnnnnnnnnnnnnnnnnnnnnnnnnnnnnnnnnnnnnnnnnnnnnnnnnnnnnnnnnnnnnnnnnnnnnnnnnnnnnnnnnnnnnnnnnnnnnnnnnnnnnnnnnnnnnnnnnnnnnnnnnnnnnnnnnnnnnnnnnnnnnnnnnnnnnnnnnnnnnnnnnnnnnnnnnnnnnnnnnnnnnnnnnnnnnnnnnnnnnnnnnnnnnnnnnnnnnnnnnnnnnnnnnnnnnnnnnnnnnnnnnnnnnnnnnnnnnnnnnnnnnnnnnnnnnnnnnnnnnnnnnnnnnnnnnnnnnnnnnnnnnnnnnnnnnnnnnnnnnnnnnnnnnnnnnnnnnnnnnnnnnnnnnnnnnnnnnnnnnnnnnnnnnnnnnnnnnnnnnnnnnnnnnnnnnnnnnnnnnnnnnnnnnnnnnnnnnnnnnnnnnnnnnnnnnnnnnnnnnnnnnnnnnnnnnnnnnnnnnnnnnnnnnnnnnnnnnnnnnnnnnnnnnnnnnnnnnnnnnnnnnnnnnnnnnnnnnnnnnnnnnnnnnnnnnnnnnnnnnnnnnnnnnnnnnnnnnnnnnnnnnnnnnnnnnnnnnnnnnnnnnnnnnnnnnnnnnnnnnnnnnnnnnnnnnnnnnnnnnnnnnnnnnnnnnnnnnnnnnnnnnnnnnnnnnnnnnnnnnnnnnnnnnnnnnnnnnnnnnnnnnnnnnnnnnnnnnnnnnnnnnnnnnnnnnnnnnnnnnnnnnnnnnnnnnnnnnnnnnnnnnnnnnnnnnnnnnnnnnnnnnnnnnnnnnnnnnnnnnnnnnnnnnnnnnnnnnnnnnnnnnnnnnnnnnnnnnnnnnnnnnnnnnnnnnnnnnnnnnnnnnnnnnnnnnnnnnnnnnnnnnnnnnnnnnnnnnnnnnnnnnnnnnnnnnnnnnnnnnnnnnnnnnnnnnnnnnnnnnnnnnnnnnnnnnnnnnnnnnnnnnnnnnnnnnnnnnnnnnnnnnnnnnnnnnnnnnnnnnnnnnnnnnnnnnnnnnnnnnnnnnnnnnnnnnnnnnnnnnnnnnnnnnnnnnnnnnnnnnnnnnnnnnnnnnnnnnnnnnnnnnnnnnnnnnnnnnnnnnnnnnnnnnnnnnnnnnnnnnnnnnnnnnnnnnnnnnnnnnnnnnnnnnnnnnnnnnnnnnnnnnnnnnnnnnnnnnnnnnnnnnnnnnnnnnnnnnnnnnnnnnnnnnnnnnnnnnnnnnnnnnnnnnnnnnnnnnnnnnnnnnnnnnnnnnnnnnnnnnnnnnnnnnnnnnnnnnnnnnnnnnnnnnnnnnnnnnnnnnnnnnnnnnnnnnnnnnnnnnnnnnnnnnnnnnnnnnnnnnnnnnnnnnnnnnnnnnnnnnnnnnnnnnnnnnnnnnnnnnnnnnnnnnnnnnnnnnnnnnnnnnnnnnnnnnnnnnnnnnnnnnnnnnnnnnnnnnnnnnnnnnnnnnnnnnnnnnnnnnnnnnnnnnnnnnnnnnnnnnnnnnnnnnnnnnnnnnnnnnnnnnnnnnnnnnnnnnnnnnnnnnnnnnnnnnnnnnnnnnnnnnnnnnnnnnnnnnnnnnnnnnnnnnnnnnnnnnnnnnnnnnnnnnnnnnnnnnnnnnnnnnnnnnnnnnnnnnnnnnnnnnnnnnnnnnnnnnnnnnnnnnnnnnnnnnnnnnnnnnnnnnnnnnnnnnnnnnnnnnnnnnnnnnnnnnnnnnnnnnnnnnnnnnnnnnnnnnnnnnnnnnnnnnnnnnnnnnnnnnnnnnnnnnnnnnnnnnnnnnnnnnnnnnnnnnnnnnnnnnnnnnnnnnnnnnnnnnnnnnnnnnnnnnnnnnnnnnnnnnnnnnnnnnnnnnnnnnnnnnnnnnnnnnnnnnnnnnnnnnnnnnnnnnnnnnnnnnnnnnnnnnnnnnnnnnnnnnnnnnnnnnnnnnnnnnnnnnnnnnnnnnnnnnnnnnnnnnnnnnnnnnnnnnnnnnnnnnnnnnnnnnnnnnnnnnnnnnnnnnnnnnnnnnnnnnnnnnnnnnnnnnnnnnnnnnnnnnnnnnnnnnnnnnnnnnnnnnnnnnnnnnnnnnnnnnnnnnnnnnnnnnnnnnnnnnnnnnnnnnnnnnnnnnnnnnnnnnnnnnnnnnnnnnnnnnnnnnnnnnnnnnnnnnnnnnnnnnnnnnnnnnnnnnnnnnnnnnnnnnnnnnnnnnnnnnnnnnnnnnnnnnnnnnnnnnnnnnnnnnnnnnnnnnnnnnnnnnnnnnnnnnnnnnnnnnnnnnnnnnnnnnnnnnnnnnnnnnnnnnnnnnnnnnnnnnnnnnnnnnnnnnnnnnnnnnnnnnnnnnnnnnnnnnnnnnnnnnnnnnnnnnnnnnnnnnnnnnnnnnnnnnnnnnnnnnnnnnnnnnnnnnnnnnnnnnnnnnnnnnnnnnnnnnnnnnnnnnnnnnnnnnnnnnnnnnnnnnnnnnnnnnnnnnnnnnnnnnnnnnnnnnnnnnnnnnnnnnnnnnnnnnnnnnnnnnnnnnnnnnnnnnnnnnnnnnnnnnnnnnnnnnnnnnnnnnnnnnnnnnnnnnnnnnnnnnnnnnnnnnnnnnnnnnnnnnnnnnnnnnnnnnnnnnnnnnnnnnnnnnnnnnnnnnnnnnnnnnnnnnnnnnnnnnnnnnnnnnnnnnnnnnnnnnnnnnnnnnnnnnnnnnnnnnnnnnnnnnnnnnnnnnnnnnnnnnnnnnnnnnnnnnnnnnnnnnnnnnnnnnnnnnnnnnnnnnnnnnnnnnnnnnnnnnnnnnnnnnnnnnnnnnnnnnnnnnnnnnnnnnnnnnnnnnnnnnnnnnnnnnnnnnnnnnnnnnnnnnnnnnnnnnnnnnnnnnnnnnnnnnnnnnnnnnnnnnnnnnnnnnnnnnnnnnnnnnnnnnnnnnnnnnnnnnnnnnnnnnnnnnnnnnnnnnnnnnnnnnnnnnnnnnnnnnnnnnnnnnnnnnnnnnnnnnnnnnnnnnnnnnnnnnnnnnnnnnnnnnnnnnnnnnnnnnnnnnnnnnnnnnnnnnnnnnnnnnnnnnnnnnnnnnnnnnnnnnnnnnnnnnnnnnnnnnnnnnnnnnnnnnnnnnnnnnnnnnnnnnnnnnnnnnnnnnnnnnnnnnnnnnnnnnnnnnnnnnnnnnnnnnnnnnnnnnnnnnnnnnnnnnnnnnnnnnnnnnnnnnnnnnnnnnnnnnnnnnnnnnnnnnnnnnnnnnnnnnnnnnnnnnnnnnnnnnnnnnnnnnnnnnnnnnnnnnnnnnnnnnnnnnnnnnnnnnnnnnnnnnnnnnnnnnnnnnnnnnnnnnnnnnnnnnnnnnnnnnnnnnnnnnnnnnnnnnnnnnnnnnnnnnnnnnnnnnnnnnnnnnnnnnnnnnnnnnnnnnnnnnnnnnnnnnnnnnnnnnnnnnnnnnnnnnnnnnnnnnnnnnnnnnnnnnnnnnnnnnnnnnnnnnnnnnnnnnnnnnnnnnnnnnnnnnnnnnnnnnnnnnnnnnnnnnnnnnnnnnnnnnnnnnnnnnnnnnnnnnnnnnnnnnnnnnnnnnnnnnnnnnnnnnnnnnnnnnnnnnnnnnnnnnnnnnnnnnnnnnnnnnnnnnnnnnnnnnnnnnnnnnnnnnnnnnnnnnnnnnnnnnnnnnnnnnnnnnnnnnnnnnnnnnnnnnnnnnnnnnnnnnnnnnnnnnnnnnnnnnnnnnnnnnnnnnnnnnnnnnnnnnnnnnnnnnnnnnnnnnnnnnnnnnnnnnnnnnnnnnnnnnnnnnnnnnnnnnnnnnnnnnnnnnnnnnnnnnnnnnnnnnnnnnnnnnnnnnnnnnnnnnnnnnnnnnnnnnnnnnnnnnnnnnnnnnnnnnnnnnnnnnnnnnnnnnnnnnnnnnnnnnnnnnnnnnnnnnnnnnnnnnnnnnnnnnnnnnnnnnnnnnnnnnnnnnnnnnnnnnnnnnnnnnnnnnnnnnnnnnnnnnnnnnnnnnnnnnnnnnnnnnnnnnnnnnnnnnnnnnnnnnnnnnnnnnnnnnnnnnnnnnnnnnnnnnnnnnnnnnnnnnnnnnnnnnnnnnnnnnnnnnnnnnnnnnnnnnnnnnnnnnnnnnnnnnnnnnnnnnnnnnnnnnnnnnnnnnnnnnnnnnnnnnnnnnnnnnnnnnnnnnnnnnnnnnnnnnnnnnnnnnnnnnnnnnnnnnnnnnnnnnnnnnnnnnnnnnnnnnnnnnnnnnnnnnnnnnnnnnnnnnnnnnnnnnnnnnnnnnnnnnnnnnnnnnnnnnnnnnnnnnnnnnnnnnnnnnnnnnnnnnnnnnnnnnnnnnnnnnnnnnnnnnnnnnnnnnnnnnnnnnnnnnnnnnnnnnnnnnnnnnnnnnnnnnnnnnnnnnnnnnnnnnnnnnnnnnnnnnnnnnnnnnnnnnnnnnnnnnnnnnnnnnnnnnnnnnnnnnnnnnnnnnnnnnnnnnnnnnnnnnnnnnnnnnnnnnnnnnnnnnnnnnnnnnnnnnnnnnnnnnnnnnnnnnnnnnnnnnnnnnnnnnnnnnnnnnnnnnnnnnnnnnnnnnnnnnnnnnnnnnnnnnnnnnnnnnnnnnnnnnnnnnnnnnnnnnnnnnnnnnnnnnnnnnnnnnnnnnnnnnnnnnnnnnnnnnnnnnnnnnnnnnnnnnnnnnnnnnnnnnnnnnnnnnnnnnnnnnnnnnnnnnnnnnnnnnnnnnnnnnnnnnnnnnnnnnnnnnnnnnnnnnnnnnnnnnnnnnnnnnnnnnnnnnnnnnnnnnnnnnnnnnnnnnnnnnnnnnnnnnnnnnnnnnnnnnnnnnnnnnnnnnnnnnnnnnnnnnnnnnnnnnnnnnnnnnnnnnnnnnnnnnnnnnnnnnnnnnnnnnnnnnnnnnnnnnnnnnnnnnnnnnnnnnnnnnnnnnnnnnnnnnnnnnnnnnnnnnnnnnnnnnnnnnnnnnnnnnnnnnnnnnnnnnnnnnnnnnnnnnnnnnnnnnnnnnnnnnnnnnnnnnnnnnnnnnnnnnnnnnnnnnnnnnnnnnnnnnnnnnnnnnnnnnnnnnnnnnnnnnnnnnnnnnnnnnnnnnnnnnnnnnnnnnnnnnnnnnnnnnnnnnnnnnnnnnnnnnnnnnnnnnnnnnnnnnnnnnnnnnnnnnnnnnnnnnnnnnnnnnnnnnnnnnnnnnnnnnnnnnnnnnnnnnnnnnnnnnnnnnnnnnnnnnnnnnnnnnnnnnnnnnnnnnnnnnnnnnnnnnnnnnnnnnnnnnnnnnnnnnnnnnnnnnnnnnnnnnnnnnnnnnnnnnnnnnnnnnnnnnnnnnnnnnnnnnnnnnnnnnnnnnnnnnnnnnnnnnnnnnnnnnnnnnnnnnnnnnnnnnnnnnnnnnnnnnnnnnnnnnnnnnnnnnnnnnnnnnnnnnnnnnnnnnnnnnnnnnnnnnnnnnnnnnnnnnnnnnnnnnnnnnnnnnnnnnnnnnnnnnnnnnnnnnnnnnnnnnnnnnnnnnnnnnnnnnnnnnnnnnnnnnnnnnnnnnnnnnnnnnnnnnnnnnnnnnnnnnnnnnnnnnnnnnnnnnnnnnnnnnnnnnnnnnnnnnnnnnnnnnnnnnnnnnnnnnnnnnnnnnnnnnnnnnnnnnnnnnnnnnnnnnnnnnnnnnnnnnnnnnnnnnnnnnnnnnnnnnnnnnnnnnnnnnnnnnnnnnnnnnnnnnnnnnnnnnnnnnnnnnnnnnnnnnnnnnnnnnnnnnnnnnnnnnnnnnnnnnnnnnnnnnnnnnnnnnnnnnnnnnnnnnnnnnnnnnnnnnnnnnnnnnnnnnnnnnnnnnnnnnnnnnnnnnnnnnnnnnnnnnnnnnnnnnnnnnnnnnnnnnnnnnnnnnnnnnnnnnnnnnnnnnnnnnnnnnnnnnnnnnnnnnnnnnnnnnnnnnnnnnnnnnnnnnnnnnnnnnnnnnnnnnnnnnnnnnnnnnnnnnnnnnnnnnnnnnnnnnnnnnnnnnnnnnnnnnnnnnnnnnnnnnnnnnnnnnnnnnnnnnnnnnnnnnnnnnnnnnnnnnnnnnnnnnnnnnnnnnnnnnnnnnnnnnnnnnnnnnnnnnnnnnnnnnnnnnnnnnnnnnnnnnnnnnnnnnnnnnnnnnnnnnnnnnnnnnnnnnnnnnnnnnnnnnnnnnnnnnnnnnnnnnnnnnnnnnnnnnnnnnnnnnnnnnnnnnnnnnnnnnnnnnnnnnnnnnnnnnnnnnnnnnnnnnnnnnnnnnnnnnnnnnnnnnnnnnnnnnnnnnnnnnnnnnnnnnnnnnnnnnnnnnnnnnnnnnnnnnnnnnnnnnnnnnnnnnnnnnnnnnnnnnnnnnnnnnnnnnnnnnnnnnnnnnnnnnnnnnnnnnnnnnnnnnnnnnnnnnnnnnnnnnnnnnnnnnnnnnnnnnnnnnnnnnnnnnnnnnnnnnnnnnnnnnnnnnnnnnnnnnnnnnnnnnnnnnnnnnnnnnnnnnnnnnnnnnnnnnnnnnnnnnnnnnnnnnnnnnnnnnnnnnnnnnnnnnnnnnnnnnnnnnnnnnnnnnnnnnnnnnnnnnnnnnnnnnnnnnnnnnnnnnnnnnnnnnnnnnnnnnnnnnnnnnnnnnnnnnnnnnnnnnnnnnnnnnnnnnnnnnnnnnnnnnnnnnnnnnnnnnnnnnnnnnnnnnnnnnnnnnnnnnnnnnnnnnnnnnnnnnnnnnnnnnnnnnnnnnnnnnnnnnnnnnnnnnnnnnnnnnnnnnnnnnnnnnnnnnnnnnnnnnnnnnnnnnnnnnnnnnnnnnnnnnnnnnnnnnnnnnnnnnnnnnnnnnnnnnnnnnnnnnnnnnnnnnnnnnnnnnnnnnnnnnnnnnnnnnnnnnnnnnnnnnnnnnnnnnnnnnnnnnnnnnnnnnnnnnnnnnnnnnnnnnnnnnnnnnnnnnnnnnnnnnnnnnnnnnnnnnnnnnnnnnnnnnnnnnnnnnnnnnnnnnnnnnnnnnnnnnnnnnnnnnnnnnnnnnnnnnnnnnnnnnnnnnnnnnnnnnnnnnnnnnnnnnnnnnnnnnnnnnnnnnnnnnnnnnnnnnnnnnnnnnnnnnnnnnnnnnnnnnnnnnnnnnnnnnnnnnnnnnnnnnnnnnnnnnnnnnnnnnnnnnnnnnnnnnnnnnnnnnnnnnnnnnnnnnnnnnnnnnnnnnnnnnnnnnnnnnnnnnnnnnnnnnnnnnnnnnnnnnnnnnnnnnnnnnnnnnnnnnnnnnnnnnnnnnnnnnnnnnnnnnnnnnnnnnnnnnnnnnnnnnnnnnnnnnnnnnnnnnnnnnnnnnnnnnnnnnnnnnnnnnnnnnnnnnnnnnnnnnnnnnnnnnnnnnnnnnnnnnnnnnnnnnnnnnnnnnnnnnnnnnnnnnnnnnnnnnnnnnnnnnnnnnnnnnnnnnnnnnnnnnnnnnnnnnnnnnnnnnnnnnnnnnnnnnnnnnnnnnnnnnnnnnnnnnnnnnnnnnnnnnnnnnnnnnnnnnnnnnnnnnnnnnnnnnnnnnnnnnnnnnnnnnnnnnnnnnnnnnnnnnnnnnnnnnnnnnnnnnnnnnnnnnnnnnnnnnnnnnnnnnnnnnnnnnnnnnnnnnnnnnnnnnnnnnnnnnnnnnnnnnnnnnnnnnnnnnnnnnnnnnnnnnnnnnnnnnnnnnnnnnnnnnnnnnnnnnnnnnnnnnnnnnnnnnnnnnnnnnnnnnnnnnnnnnnnnnnnnnnnnnnnnnnnnnnnnnnnnnnnnnnnnnnnnnnnnnnnnnnnnnnnnnnnnnnnnnnnnnnnnnnnnnnnnnnnnnnnnnnnnnnnnnnnnnnnnnnnnnnnnnnnnnnnnnnnnnnnnnnnnnnnnnnnnnnnnnnnnnnnnnnnnnnnnnnnnnnnnnnnnnnnnnnnnnnnnnnnnnnnnnnnnnnnnnnnnnnnnnnnnnnnnnnnnnnnnnnnnnnnnnnnnnnnnnnnnnnnnnnnnnnnnnnnnnnnnnnnnnnnnnnnnnnnnnnnnnnnnnnnnnnnnnnnnnnnnnnnnnnnnnnnnnnnnnnnnnnnnnnnnnnnnnnnnnnnnnnnnnnnnnnnnnnnnnnnnnnnnnnnnnnnnnnnnnnnnnnnnnnnnnnnnnnnnnnnnnnnnnnnnnnnnnnnnnnnnnnnnnnnnnnnnnnnnnnnnnnnnnnnnnnnnnnnnnnnnnnnnnnnnnnnnnnnnnnnnnnnnnnnnnnnnnnnnnnnnnnnnnnnnnnnnnnnnnnnnnnnnnnnnnnnnnnnnnnnnnnnnnnnnnnnnnnnnnnnnnnnnnnnnnnnnnnnnnnnnnnnnnnnnnnnnnnnnnnnnnnnnnnnnnnnnnnnnnnnnnnnnnnnnnnnnnnnnnnnnnnnnnnnnnnnnnnnnnnnnnnnnnnnnnnnnnnnnnnnnnnnnnnnnnnnnnnnnnnnnnnnnnnnnnnnnnnnnnnnnnnnnnnnnnnnnnnnnnnnnnnnnnnnnnnnnnnnnnnnnnnnnnnnnnnnnnnnnnnnnnnnnnnnnnnnnnnnnnnnnnnnnnnnnnnnnnnnnnnnnnnnnnnnnnnnnnnnnnnnnnnnnnnnnnnnnnnnnnnnnnnnnnnnnnnnnnnnnnnnnnnnnnnnnnnnnnnnnnnnnnnnnnnnnnnnnnnnnnnnnnnnnnnnnnnnnnnnnnnnnnnnnnnnnnnnnnnnnnnnnnnnnnnnnnnnnnnnnnnnnnnnnnnnnnnnnnnnnnnnnnnnnnnnnnnnnnnnnnnnnnnnnnnnnnnnnnnnnnnnnnnnnnnnnnnnnnnnnnnnnnnnnnnnnnnnnnnnnnnnnnnnnnnnnnnnnnnnnnnnnnnnnnnnnnnnnnnnnnnnnnnnnnnnnnnnnnnnnnnnnnnnnnnnnnnnnnnnnnnnnnnnnnnnnnnnnnnnnnnnnnnnnnnnnnnnnnnnnnnnnnnnnnnnnnnnnnnnnnnnnnnnnnnnnnnnnnnnnnnnnnnnnnnnnnnnnnnnnnnnnnnnnnnnnnnnnnnnnnnnnnnnnnnnnnnnnnnnnnnnnnnnnnnnnnnnnnnnnnnnnnnnnnnnnnnnnnnnnnnnnnnnnnnnnnnnnnnnnnnnnnnnnnnnnnnnnnnnnnnnnnnnnnnnnnnnnnnnnnnnnnnnnnnnnnnnnnnnnnnnnnnnnnnnnnnnnnnnnnnnnnnnnnnnnnnnnnnnnnnnnnnnnnnnnnnnnnnnnnnnnnnnnnnnnnnnnnnnnnnnnnnnnnnnnnnnnnnnnnnnnnnnnnnnnnnnnnnnnnnnnnnnnnnnnnnnnnnnnnnnnnnnnnnnnnnnnnnnnnnnnnnnnnnnnnnnnnnnnnnnnnnnnnnnnnnnnnnnnnnnnnnnnnnnnnnnnnnnnnnnnnnnnnnnnnnnnnnnnnnnnnnnnnnnnnnnnnnnnnnnnnnnnnnnnnnnnnnnnnnnnnnnnnnnnnnnnnnnnnnnnnnnnnnnnnnnnnnnnnnnnnnnnnnnnnnnnnnnnnnnnnnnnnnnnnnnnnnnnnnnnnnnnnnnnnnnnnnnnnnnnnnnnnnnnnnnnnnnnnnnnnnnnnnnnnnnnnnnnnnnnnnnnnnnnnnnnnnnnnnnnnnnnnnnnnnnnnnnnnnnnnnnnnnnnnnnnnnnnnnnnnnnnnnnnnnnnnnnnnnnnnnnnnnnnnnnnnnnnnnnnnnnnnnnnnnnnnnnnnnnnnnnnnnnnnnnnnnnnnnnnnnnnnnnnnnnnnnnnnnnnnnnnnnnnnnnnnnnnnnnnnnnnnnnnnnnnnnnnnnnnnnnnnnnnnnnnnnnnnnnnnnnnnnnnnnnnnnnnnnnnnnnnnnnnnnnnnnnnnnnnnnnnnnnnnnnnnnnnnnnnnnnnnnnnnnnnnnnnnnnnnnnnnnnnnnnnnnnnnnnnnnnnnnnnnnnnnnnnnnnnnnnnnnnnnnnnnnnnnnnnnnnnnnnnnnnnnnnnnnnnnnnnnnnnnnnnnnnnnnnnnnnnnnnnnnnnnnnnnnnnnnnnnnnnnnnnnnnnnnnnnnnnnnnnnnnnnnnnnnnnnnnnnnnnnnnnnnnnnnnnnnnnnnnnnnnnnnnnnnnnnnnnnnnnnnnnnnnnnnnnnnnnnnnnnnnnnnnnnnnnnnnnnnnnnnnnnnnnnnnnnnnnnnnnnnnnnnnnnnnnnnnnnnnnnnnnnnnnnnnnnnnnnnnnnnnnnnnnnnnnnnnnnnnnnnnnnnnnnnnnnnnnnnnnnnnnnnnnnnnnnnnnnnnnnnnnnnnnnnnnnnnnnnnnnnnnnnnnnnnnnnnnnnnnnnnnnnnnnnnnnnnnnnnnnnnnnnnnnnnnnnnnnnnnnnnnnnnnnnnnnnnnnnnnnnnnnnnnnnnnnnnnnnnnnnnnnnnnnnnnnnnnnnnnnnnnnnnnnnnnnnnnnnnnnnnnnnnnnnnnnnnnnnnnnnnnnnnnnnnnnnnnnnnnnnnnnnnnnnnnnnnnnnnnnnnnnnnnnnnnnnnnnnnnnnnnnnnnnnnnnnnnnnnnnnnnnnnnnnnnnnnnnnnnnnnnnnnnnnnnnnnnnnnnnnnnnnnnnnnnnnnnnnnnnnnnnnnnnnnnnnnnnnnnnnnnnnnnnnnnnnnnnnnnnnnnnnnnnnnnnnnnnnnnnnnnnnnnnnnnnnnnnnnnnnnnnnnnnnnnnnnnnnnnnnnnnnnnnnnnnnnnnnnnnnnnnnnnnnnnnnnnnnnnnnnnnnnnnnnnnnnnnnnnnnnnnnnnnnnnnnnnnnnnnnnnnnnnnnnnnnnnnnnnnnnnnnnnnnnnnnnnnnnnnnnnnnnnnnnnnnnnnnnnnnnnnnnnnnnnnnnnnnnnnnnnnnnnnnnnnnnnnnnnnnnnnnnnnnnnnnnnnnnnnnnnnnnnnnnnnnnnnnnnnnnnnnnnnnnnnnnnnnnnnnnnnnnnnnnnnnnnnnnnnnnnnnnnnnnnnnnnnnnnnnnnnnnnnnnnnnnnnnnnnnnnnnnnnnnnnnnnnnnnnnnnnnnnnnnnnnnnnnnnnnnnnnnnnnnnnnnnnnnnnnnnnnnnnnnnnnnnnnnnnnnnnnnnnnnnnnnnnnnnnnnnnnnnnnnnnnnnnnnnnnnnnnnnnnnnnnnnnnnnnnnnnnnnnnnnnnnnnnnnnnnnnnnnnnnnnnnnnnnnnnnnnnnnnnnnnnnnnnnnnnnnnnnnnnnnnnnnnnnnnnnnnnnnnnnnnnnnnnnnnnnnnnnnnnnnnnnnnnnnnnnnnnnnnnnnnnnnnnnnnnnnnnnnnnnnnnnnnnnnnnnnnnnnnnnnnnnnnnnnnnnnnnnnnnnnnnnnnnnnnnnnnnnnnnnnnnnnnnnnnnnnnnnnnnnnnnnnnnnnnnnnnnnnnnnnnnnnnnnnnnnnnnnnnnnnnnnnnnnnnnnnnnnnnnnnnnnnnnnnnnnnnnnnnnnnnnnnnnnnnnnnnnnnnnnnnnnnnnnnnnnnnnnnnnnnnnnnnnnnnnnnnnnnnnnnnnnnnnnnnnnnnnnnnnnnnnnnnnnnnnnnnnnnnnnnnnnnnnnnnnnnnnnnnnnnnnnnnnnnnnnnnnnnnnnnnnnnnnnnnnnnnnnnnnnnnnnnnnnnnnnnnnnnnnnnnnnnnnnnnnnnnnnnnnnnnnnnnnnnnnnnnnnnnnnnnnnnnnnnnnnnnnnnnnnnnnnnnnnnnnnnnnnnnnnnnnnnnnnnnnnnnnnnnnnnnnnnnnnnnnnnnnnnnnnnnnnnnnnnnnnnnnnnnnnnnnnnnnnnnnnnnnnnnnnnnnnnnnnnnnnnnnnnnnnnnnnnnnnnnnnnnnnnnnnnnnnnnnnnnnnnnnnnnnnnnnnnnnnnnnnnnnnnnnnnnnnnnnnnnnnnnnnnnnnnnnnnnnnnnnnnnnnnnnnnnnnnnnnnnnnnnnnnnnnnnnnnnnnnnnnnnnnnnnnnnnnnnnnnnnnnnnnnnnnnnnnnnnnnnnnnnnnnnnnnnnnnnnnnnnnnnnnnnnnnnnnnnnnnnnnnnnnnnnnnnnnnnnnnnnnnnnnnnnnnnnnnnnnnnnnnnnnnnnnnnnnnnnnnnnnnnnnnnnnnnnnnnnnnnnnnnnnnnnnnnnnnnnnnnnnnnnnnnnnnnnnnnnnnnnnnnnnnnnnnnnnnnnnnnnnnnnnnnnnnnnnnnnnnnnnnnnnnnnnnnnnnnnnnnnnnnnnnnnnnnnnnnnnnnnnnnnnnnnnnnnnnnnnnnnnnnnnnnnnnnnnnnnnnnnnnnnnnnnnnnnnnnnnnnnnnnnnnnnnnnnnnnnnnnnnnnnnnnnnnnnnnnnnnnnnnnnnnnnnnnnnnnnnnnnnnnnnnnnnnnnnnnnnnnnnnnnnnnnnnnnnnnnnnnnnnnnnnnnnnnnnnnnnnnnnnnnnnnnnnnnnnnnnnnnnnnnnnnnnnnnnnnnnnnnnnnnnnnnnnnnnnnnnnnnnnnnnnnnnnnnnnnnnnnnnnnnnnnnnnnnnnnnnnnnnnnnnnnnnnnnnnnnnnnnnnnnnnnnnnnnnnnnnnnnnnnnnnnnnnnnnnnnnnnnnnnnnnnnnnnnnnnnnnnnnnnnnnnnnnnnnnnnnnnnnnnnnnnnnnnnnnnnnnnnnnnnnnnnnnnnnnnnnnnnnnnnnnnnnnnnnnnnnnnnnnnnnnnnnnnnnnnnnnnnnnnnnnnnnnnnnnnnnnnnnnnnnnnnnnnnnnnnnnnnnnnnnnnnnnnnnnnnnnnnnnnnnnnnnnnnnnnnnnnnnnnnnnnnnnnnnnnnnnnnnnnnnnnnnnnnnnnnnnnnnnnnnnnnnnnnnnnnnnnnnnnnnnnnnnnnnnnnnnnnnnnnnnnnnnnnnnnnnnnnnnnnnnnnnnnnnnnnnnnnnnnnnnnnnnnnnnnnnnnnnnnnnnnnnnnnnnnnnnnnnnnnnnnnnnnnnnnnnnnnnnnnnnnnnnnnnnnnnnnnnnnnnnnnnnnnnnnnnnnnnnnnnnnnnnnnnnnnnnnnnnnnnnnnnnnnnnnnnnnnnnnnnnnnnnnnnnnnnnnnnnnnnnnnnnnnnnnnnnnnnnnnnnnnnnnnnnnnnnnnnnnnnnnnnnnnnnnnnnnnnnnnnnnnnnnnnnnnnnnnnnnnnnnnnnnnnnnnnnnnnnnnnnnnnnnnnnnnnnnnnnnnnnnnnnnnnnnnnnnnnnnnnnnnnnnnnnnnnnnnnnnnnnnnnnnnnnnnnnnnnnnnnnnnnnnnnnnnnnnnnnnnnnnnnnnnnnnnnnnnnnnnnnnnnnnnnnnnnnnnnnnnnnnnnnnnnnnnnnnnnnnnnnnnnnnnnnnnnnnnnnnnnnnnnnnnnnnnnnnnnnnnnnnnnnnnnnnnnnnnnnnnnnnnnnnnnnnnnnnnnnnnnnnnnnnnnnnnnnnnnnnnnnnnnnnnnnnnnnnnnnnnnnnnnnnnnnnnnnnnnnnnnnnnnnnnnnnnnnnnnnnnnnnnnnnnnnnnnnnnnnnnnnnnnnnnnnnnnnnnnnnnnnnnnnnnnnnnnnnnnnnnnnnnnnnnnnnnnnnnnnnnnnnnnnnnnnnnnnnnnnnnnnnnnnnnnnnnnnnnnnnnnnnnnnnnnnnnnnnnnnnnnnnnnnnnnnnnnnnnnnnnnnnnnnnnnnnnnnnnnnnnnnnnnnnnnnnnnnnnnnnnnnnnnnnnnnnnnnnnnnnnnnnnnnnnnnnnnnnnnnnnnnnnnnnnnnnnnnnnnnnnnnnnnnnnnnnnnnnnnnnnnnnnnnnnnnnnnnnnnnnnnnnnnnnnnnnnnnnnnnnnnnnnnnnnnnnnnnnnnnnnnnnnnnnnnnnnnnnnnnnnnnnnnnnnnnnnnnnnnnnnnnnnnnnnnnnnnnnnnnnnnnnnnnnnnnnnnnnnnnnnnnnnnnnnnnnnnnnnnnnnnnnnnnnnnnnnnnnnnnnnnnnnnnnnnnnnnnnnnnnnnnnnnnnnnnnnnnnnnnnnnnnnnnnnnnnnnnnnnnnnnnnnnnnnnnnnnnnnnnnnnnnnnnnnnnnnnnnnnnnnnnnnnnnnnnnnnnnnnnnnnnnnnnnnnnnnnnnnnnnnnnnnnnnnnnnnnnnnnnnnnnnnnnnnnnnnnnnnnnnnnnnnnnnnnnnnnnnnnnnnnnnnnnnnnnnnnnnnnnnnnnnnnnnnnnnnnnnnnnnnnnnnnnnnnnnnnnnnnnnnnnnnnnnnnnnnnnnnnnnnnnnnnnnnnnnnnnnnnnnnnnnnnnnnnnnnnnnnnnnnnnnnnnnnnnnnnnnnnnnnnnnnnnnnnnnnnnnnnnnnnnnnnnnnnnnnnnnnnnnnnnnnnnnnnnnnnnnnnnnnnnnnnnnnnnnnnnnnnnnnnnnnnnnnnnnnnnnnnnnnnnnnnnnnnnnnnnnnnnnnnnnnnnnnnnnnnnnnnnnnnnnnnnnnnnnnnnnnnnnnnnnnnnnnnnnnnnnnnnnnnnnnnnnnnnnnnnnnnnnnnnnnnnnnnnnnnnnnnnnnnnnnnnnnnnnnnnnnnnnnnnnnnnnnnnnnnnnnnnnnnnnnnnnnnnnnnnnnnnnnnnnnnnnnnnnnnnnnnnnnnnnnnnnnnnnnnnnnnnnnnnnnnnnnnnnnnnnnnnnnnnnnnnnnnnnnnnnnnnnnnnnnnnnnnnnnnnnnnnnnnnnnnnnnnnnnnnnnnnnnnnnnnnnnnnnnnnnnnnnnnnnnnnnnnnnnnnnnnnnnnnnnnnnnnnnnnnnnnnnnnnnnnnnnnnnnnnnnnnnnnnnnnnnnnnnnnnnnnnnnnnnnnnnnnnnnnnnnnnnnnnnnnnnnnnnnnnnnnnnnnnnnnnnnnnnnnnnnnnnnnnnnnnnnnnnnnnnnnnnnnnnnnnnnnnnnnnnnnnnnnnnnnnnnnnnnnnnnnnnnnnnnnnnnnnnnnnnnnnnnnnnnnnnnnnnnnnnnnnnnnnnnnnnnnnnnnnnnnnnnnnnnnnnnnnnnnnnnnnnnnnnnnnnnnnnnnnnnnnnnnnnnnnnnnnnnnnnnnnnnnnnnnnnnnnnnnnnnnnnnnnnnnnnnnnnnnnnnnnnnnnnnnnnnnnnnnnnnnnnnnnnnnnnnnnnnnnnnnnnnnnnnnnnnnnnnnnnnnnnnnnnnnnnnnnnnnnnnnnnnnnnnnnnnnnnnnnnnnnnnnnnnnnnnnnnnnnnnnnnnnnnnnnnnnnnnnnnnnnnnnnnnnnnnnnnnnnnnnnnnnnnnnnnnnnnnnnnnnnnnnnnnnnnnnnnnnnnnnnnnnnnnnnnnnnnnnnnnnnnnnnnnnnnnnnnnnnnnnnnnnnnnnnnnnnnnnnnnnnnnnnnnnnnnnnnnnnnnnnnnnnnnnnnnnnnnnnnnnnnnnnnnnnnnnnnnnnnnnnnnnnnnnnnnnnnnnnnnnnnnnnnnnnnnnnnnnnnnnnnnnnnnnnnnnnnnnnnnnnnnnnnnnnnnnnnnnnnnnnnnnnnnnnnnnnnnnnnnnnnnnnnnnnnnnnnnnnnnnnnnnnnnnnnnnnnnnnnnnnnnnnnnnnnnnnnnnnnnnnnnnnnnnnnnnnnnnnnnnnnnnnnnnnnnnnnnnnnnnnnnnnnnnnnnnnnnnnnnnnnnnnnnnnnnnnnnnnnnnnnnnnnnnnnnnnnnnnnnnnnnnnnnnnnnnnnnnnnnnnnnnnnnnnnnnnnnnnnnnnnnnnnnnnnnnnnnnnnnnnnnnnnnnnnnnnnnnnnnnnnnnnnnnnnnnnnnnnnnnnnnnnnnnnnnnnnnnnnnnnnnnnnnnnnnnnnnnnnnnnnnnnnnnnnnnnnnnnnnnnnnnnnnnnnnnnnnnnnnnnnnnnnnnnnnnnnnnnnnnnnnnnnnnnnnnnnnnnnnnnnnnnnnnnnnnnnnnnnnnnnnnnnnnnnnnnnnnnnnnnnnnnnnnnnnnnnnnnnnnnnnnnnnnnnnnnnnnnnnnnnnnnnnnnnnnnnnnnnnnnnnnnnnnnnnnnnnnnnnnnnnnnnnnnnnnnnnnnnnnnnnnnnnnnnnnnnnnnnnnnnnnnnnnnnnnnnnnnnnnnnnnnnnnnnnnnnnnnnnnnnnnnnnnnnnnnnnnnnnnnnnnnnnnnnnnnnnnnnnnnnnnnnnnnnnnnnnnnnnnnnnnnnnnnnnnnnnnnnnnnnnnnnnnnnnnnnnnnnnnnnnnnnnnnnnnnnnnnnnnnnnnnnnnnnnnnnnnnnnnnnnnnnnnnnnnnnnnnnnnnnnnnnnnnnnnnnnnnnnnnnnnnnnnnnnnnnnnnnnnnnnnnnnnnnnnnnnnnnnnnnnnnnnnnnnnnnnnnnnnnnnnnnnnnnnnnnnnnnnnnnnnnnnnnnnnnnnnnnnnnnnnnnnnnnnnnnnnnnnnnnnnnnnnnnnnnnnnnnnnnnnnnnnnnnnnnnnnnnnnnnnnnnnnnnnnnnnnnnnnnnnnnnnnnnnnnnnnnnnnnnnnnnnnnnnnnnnnnnnnnnnnnnnnnnnnnnnnnnnnnnnnnnnnnnnnnnnnnnnnnnnnnnnnnnnnnnnnnnnnnnnnnnnnnnnnnnnnnnnnnnnnnnnnnnnnnnnnnnnnnnnnnnnnnnnnnnnnnnnnnnnnnnnnnnnnnnnnnnnnnnnnnnnnnnnnnnnnnnnnnnnnnnnnnnnnnnnnnnnnnnnnnnnnnnnnnnnnnnnnnnnnnnnnnnnnnnnnnnnnnnnnnnnnnnnnnnnnnnnnnnnnnnnnnnnnnnnnnnnnnnnnnnnnnnnnnnnnnnnnnnnnnnnnnnnnnnnnnnnnnnnnnnnnnnnnnnnnnnnnnnnnnnnnnnnnnnnnnnnnnnnnnnnnnnnnnnnnnnnnnnnnnnnnnnnnnnnnnnnnnnnnnnnnnnnnnnnnnnnnnnnnnnnnnnnnnnnnnnnnnnnnnnnnnnnnnnnnnnnnnnnnnnnnnnnnnnnnnnnnnnnnnnnnnnnnnnnnnnnnnnnnnnnnnnnnnnnnnnnnnnnnnnnnnnnnnnnnnnnnnnnnnnnnnnnnnnnnnnnnnnnnnnnnnnnnnnnnnnnnnnnnnnnnnnnnnnnnnnnnnnnnnnnnnnnnnnnnnnnnnnnnnnnnnnnnnnnnnnnnnnnnnnnnnnnnnnnnnnnnnnnnnnnnnnnnnnnnnnnnnnnnnnnnnnnnnnnnnnnnnnnnnnnnnnnnnnnnnnnnnnnnnnnnnnnnnnnnnnnnnnnnnnnnnnnnnnnnnnnnnnnnnnnnnnnnnnnnnnnnnnnnnnnnnnnnnnnnnnnnnnnnnnnnnnnnnnnnnnnnnnnnnnnnnnnnnnnnnnnnnnnnnnnnnnnnnnnnnnnnnnnnnnnnnnnnnnnnnnnnnnnnnnnnnnnnnnnnnnnnnnnnnnnnnnnnnnnnnnnnnnnnnnnnnnnnnnnnnnnnnnnnnnnnnnnnnnnnnnnnnnnnnnnnnnnnnnnnnnnnnnnnnnnnnnnnnnnnnnnnnnnnnnnnnnnnnnnnnnnnnnnnnnnnnnnnnnnnnnnnnnnnnnnnnnnnnnnnnnnnnnnnnnnnnnnnnnnnnnnnnnnnnnnnnnnnnnnnnnnnnnnnnnnnnnnnnnnnnnnnnnnnnnnnnnnnnnnnnnnnnnnnnnnnnnnnnnnnnnnnnnnnnnnnnnnnnnnnnnnnnnnnnnnnnnnnnnnnnnnnnnnnnnnnnnnnnnnnnnnnnnnnnnnnnnnnnnnnnnnnnnnnnnnnnnnnnnnnnnnnnnnnnnnnnnnnnnnnnnnnnnnnnnnnnnnnnnnnnnnnnnnnnnnnnnnnnnnnnnnnnnnnnnnnnnnnnnnnnnnnnnnnnnnnnnnnnnnnnnnnnnnnnnnnnnnnnnnnnnnnnnnnnnnnnnnnnnnnnnnnnnnnnnnnnnnnnnnnnnnnnnnnnnnnnnnnnnnnnnnnnnnnnnnnnnnnnnnnnnnnnnnnnnnnnnnnnnnnnnnnnnnnnnnnnnnnnnnnnnnnnnnnnnnnnnnnnnnnnnnnnnnnnnnnnnnnnnnnnnnnnnnnnnnnnnnnnnnnnnnnnnnnnnnnnnnnnnnnnnnnnnnnnnnnnnnnnnnnnnnnnnnnnnnnnnnnnnnnnnnnnnnnnnnnnnnnnnnnnnnnnnnnnnnnnnnnnnnnnnnnnnnnnnnnnnnnnnnnnnnnnnnnnnnnnnnnnnnnnnnnnnnnnnnnnnnnnnnnnnnnnnnnnnnnnnnnnnnnnnnnnnnnnnnnnnnnnnnnnnnnnnnnnnnnnnnnnnnnnnnnnnnnnnnnnnnnnnnnnnnnnnnnnnnnnnnnnnnnnnnnnnnnnnnnnnnnnnnnnnnnnnnnnnnnnnnnnnnnnnnnnnnnnnnnnnnnnnnnnnnnnnnnnnnnnnnnnnnnnnnnnnnnnnnnnnnnnnnnnnnnnnnnnnnnnnnnnnnnnnnnnnnnnnnnnnnnnnnnnnnnnnnnnnnnnnnnnnnnnnnnnnnnnnnnnnnnnnnnnnnnnnnnnnnnnnnnnnnnnnnnnnnnnnnnnnnnnnnnnnnnnnnnnnnnnnnnnnnnnnnnnnnnnnnnnnnnnnnnnnnnnnnnnnnnnnnnnnnnnnnnnnnnnnnnnnnnnnnnnnnnnnnnnnnnnnnnnnnnnnnnnnnnnnnnnnnnnnnnnnnnnnnnnnnnnnnnnnnnnnnnnnnnnnnnnnnnnnnnnnnnnnnnnnnnnnnnnnnnnnnnnnnnnnnnnnnnnnnnnnnnnnnnnnnnnnnnnnnnnnnnnnnnnnnnnnnnnnnnnnnnnnnnnnnnnnnnnnnnnnnnnnnnnnnnnnnnnnnnnnnnnnnnnnnnnnnnnnnnnnnnnnnnnnnnnnnnnnnnnnnnnnnnnnnnnnnnnnnnnnnnnnnnnnnnnnnnnnnnnnnnnnnnnnnnnnnnnnnnnnnnnnnnnnnnnnnnnnnnnnnnnnnnnnnnnnnnnnnnnnnnnnnnnnnnnnnnnnnnnnnnnnnnnnnnnnnnnnnnnnnnnnnnnnnnnnnnnnnnnnnnnnnnnnnnnnnnnnnnnnnnnnnnnnnnnnnnnnnnnnnnnnnnnnnnnnnnnnnnnnnnnnnnnnnnnnnnnnnnnnnnnnnnnnnnnnnnnnnnnnnnnnnnnnnnnnnnnnnnnnnnnnnnnnnnnnnnnnnnnnnnnnnnnnnnnnnnnnnnnnnnnnnnnnnnnnnnnnnnnnnnnnnnnnnnnnnnnnnnnnnnnnnnnnnnnnnnnnnnnnnnnnnnnnnnnnnnnnnnnnnnnnnnnnnnnnnnnnnnnnnnnnnnnnnnnnnnnnnnnnnnnnnnnnnnnnnnnnnnnnnnnnnnnnnnnnnnnnnnnnnnnnnnnnnnnnnnnnnnnnnnnnnnnnnnnnnnnnnnnnnnnnnnnnnnnnnnnnnnnnnnnnnnnnnnnnnnnnnnnnnnnnnnnnnnnnnnnnnnnnnnnnnnnnnnnnnnnnnnnnnnnnnnnnnnnnnnnnnnnnnnnnnnnnnnnnnnnnnnnnnnnnnnnnnnnnnnnnnnnnnnnnnnnnnnnnnnnnnnnnnnnnnnnnnnnnnnnnnnnnnnnnnnnnnnnnnnnnnnnnnnnnnnnnnnnnnnnnnnnnnnnnnnnnnnnnnnnnnnnnnnnnnnnnnnnnnnnnnnnnnnnnnnnnnnnnnnnnnnnnnnnnnnnnnnnnnnnnnnnnnnnnnnnnnnnnnnnnnnnnnnnnnnnnnnnnnnnnnnnnnnnnnnnnnnnnnnnnnnnnnnnnnnnnnnnnnnnnnnnnnnnnnnnnnnnnnnnnnnnnnnnnnnnnnnnnnnnnnnnnnnnnnnnnnnnnnnnnnnnnnnnnnnnnnnnnnnnnnnnnnnnnnnnnnnnnnnnnnnnnnnnnnnnnnnnnnnnnnnnnnnnnnnnnnnnnnnnnnnnnnnnnnnnnnnnnnnnnnnnnnnnnnnnnnnnnnnnnnnnnnnnnnnnnnnnnnnnnnnnnnnnnnnnnnnnnnnnnnnnnnnnnnnnnnnnnnnnnnnnnnnnnnnnnnnnnnnnnnnnnnnnnnnnnnnnnnnnnnnnnnnnnnnnnnnnnnnnnnnnnnnnnnnnnnnnnnnnnnnnnnnnnnnnnnnnnnnnnnnnnnnnnnnnnnnnnnnnnnnnnnnnnnnnnnnnnnnnnnnnnnnnnnnnnnnnnnnnnnnnnnnnnnnnnnnnnnnnnnnnnnnnnnnnnnnnnnnnnnnnnnnnnnnnnnnnnnnnnnnnnnnnnnnnnnnnnnnnnnnnnnnnnnnnnnnnnnnnnnnnnnnnnnnnnnnnnnnnnnnnnnnnnnnnnnnnnnnnnnnnnnnnnnnnnnnnnnnnnnnnnnnnnnnnnnnnnnnnnnnnnnnnnnnnnnnnnnnnnnnnnnnnnnnnnnnnnnnnnnnnnnnnnnnnnnnnnnnnnnnnnnnnnnnnnnnnnnnnnnnnnnnnnnnnnnnnnnnnnnnnnnnnnnnnnnnnnnnnnnnnnnnnnnnnnnnnnnnnnnnnnnnnnnnnnnnnnnnnnnnnnnnnnnnnnnnnnnnnnnnnnnnnnnnnnnnnnnnnnnnnnnnnnnnnnnnnnnnnnnnnnnnnnnnnnnnnnnnnnnnnnnnnnnnnnnnnnnnnnnnnnnnnnnnnnnnnnnnnnnnnnnnnnnnnnnnnnnnnnnnnnnnnnnnnnnnnnnnnnnnnnnnnnnnnnnnnnnnnnnnnnnnnnnnnnnnnnnnnnnnnnnnnnnnnnnnnnnnnnnnnnnnnnnnnnnnnnnnnnnnnnnnnnnnnnnnnnnnnnnnnnnnnnnnnnnnnnnnnnnnnnnnnnnnnnnnnnnnnnnnnnnnnnnnnnnnnnnnnnnnnnnnnnnnnnnnnnnnnnnnnnnnnnnnnnnnnnnnnnnnnnnnnnnnnnnnnnnnnnnnnnnnnnnnnnnnnnnnnnnnnnnnnnnnnnnnnnnnnnnnnnnnnnnnnnnnnnnnnnnnnnnnnnnnnnnnnnnnnnnnnnnnnnnnnnnnnnnnnnnnnnnnnnnnnnnnnnnnnnnnnnnnnnnnnnnnnnnnnnnnnnnnnnnnnnnnnnnnnnnnnnnnnnnnnnnnnnnnnnnnnnnnnnnnnnnnnnnnnnnnnnnnnnnnnnnnnnnnnnnnnnnnnnnnnnnnnnnnnnnnnnnnnnnnnnnnnnnnnnnnnnnnnnnnnnnnnnnnnnnnnnnnnnnnnnnnnnnnnnnnnnnnnnnnnnnnnnnnnnnnnnnnnnnnnnnnnnnnnnnnnnnnnnnnnnnnnnnnnnnnnnnnnnnnnnnnnnnnnnnnnnnnnnnnnnnnnnnnnnnnnnnnnnnnnnnnnnnnnnnnnnnnnnnnnnnnnnnnnnnnnnnnnnnnnnnnnnnnnnnnnnnnnnnnnnnnnnnnnnnnnnnnnnnnnnnnnnnnnnnnnnnnnnnnnnnnnnnnnnnnnnnnnnnnnnnnnnnnnnnnnnnnnnnnnnnnnnnnnnnnnnnnnnnnnnnnnnnnnnnnnnnnnnnnnnnnnnnnnnnnnnnnnnnnnnnnnnnnnnnnnnnnnnnnnnnnnnnnnnnnnnnnnnnnnnnnnnnnnnnnnnnnnnnnnnnnnnnnnnnnnnnnnnnnnnnnnnnnnnnnnnnnnnnnnnnnnnnnnnnnnnnnnnnnnnnnnnnnnnnnnnnnnnnnnnnnnnnnnnnnnnnnnnnnnnnnnnnnnnnnnnnnnnnnnnnnnnnnnnnnnnnnnnnnnnnnnnnnnnnnnnnnnnnnnnnnnnnnnnnnnnnnnnnnnnnnnnnnnnnnnnnnnnnnnnnnnnnnnnnnnnnnnnnnnnnnnnnnnnnnnnnnnnnnnnnnnnnnnnnnnnnnnnnnnnnnnnnnnnnnnnnnnnnnnnnnnnnnnnnnnnnnnnnnnnnnnnnnnnnnnnnnnnnnnnnnnnnnnnnnnnnnnnnnnnnnnnnnnnnnnnnnnnnnnnnnnnnnnnnnnnnnnnnnnnnnnnnnnnnnnnnnnnnnnnnnnnnnnnnnnnnnnnnnnnnnnnnnnnnnnnnnnnnnnnnnnnnnnnnnnnnnnnnnnnnnnnnnnnnnnnnnnnnnnnnnnnnnnnnnnnnnnnnnnnnnnnnnnnnnnnnnnnnnnnnnnnnnnnnnnnnnnnnnnnnnnnnnnnnnnnnnnnnnnnnnnnnnnnnnnnnnnnnnnnnnnnnnnnnnnnnnnnnnnnnnnnnnnnnnnnnnnnnnnnnnnnnnnnnnnnnnnnnnnnnnnnnnnnnnnnnnnnnnnnnnnnnnnnnnnnnnnnnnnnnnnnnnnnnnnnnnnnnnnnnnnnnnnnnnnnnnnnnnnnnnnnnnnnnnnnnnnnnnnnnnnnnnnnnnnnnnnnnnnnnnnnnnnnnnnnnnnnnnnnnnnnnnnnnnnnnnnnnnnnnnnnnnnnnnnnnnnnnnnnnnnnnnnnnnnnnnnnnnnnnnnnnnnnnnnnnnnnnnnnnnnnnnnnnnnnnnnnnnnnnnnnnnnnnnnnnnnnnnnnnnnnnnnnnnnnnnnnnnnnnnnnnnnnnnnnnnnnnnnnnnnnnnnnnnnnnnnnnnnnnnnnnnnnnnnnnnnnnnnnnnnnnnnnnnnnnnnnnnnnnnnnnnnnnnnnnnnnnnnnnnnnnnnnnnnnnnnnnnnnnnnnnnnnnnnnnnnnnnnnnnnnnnnnnnnnnnnnnnnnnnnnnnnnnnnnnnnnnnnnnnnnnnnnnnnnnnnnnnnnnnnnnnnnnnnnnnnnnnnnnnnnnnnnnnnnnnnnnnnnnnnnnnnnnnnnnnnnnnnnnnnnnnnnnnnnnnnnnnnnnnnnnnnnnnnnnnnnnnnnnnnnnnnnnnnnnnnnnnnnnnnnnnnnnnnnnnnnnnnnnnnnnnnnnnnnnnnnnnnnnnnnnnnnnnnnnnnnnnnnnnnnnnnnnnnnnnnnnnnnnnnnnnnnnnnnnnnnnnnnnnnnnnnnnnnnnnnnnnnnnnnnnnnnnnnnnnnnnnnnnnnnnnnnnnnnnnnnnnnnnnnnnnnnnnnnnnnnnnnnnnnnnnnnnnnnnnnnnnnnnnnnnnnnnnnnnnnnnnnnnnnnnnnnnnnnnnnnnnnnnnnnnnnnnnnnnnnnnnnnnnnnnnnnnnnnnnnnnnnnnnnnnnnnnnnnnnnnnnnnnnnnnnnnnnnnnnnnnnnnnnnnnnnnnnnnnnnnnnnnnnnnnnnnnnnnnnnnnnnnnnnnnnnnnnnnnnnnnnnnnnnnnnnnnnnnnnnnnnnnnnnnnnnnnnnnnnnnnnnnnnnnnnnnnnnnnnnnnnnnnnnnnnnnnnnnnnnnnnnnnnnnnnnnnnnnnnnnnnnnnnnnnnnnnnnnnnnnnnnnnnnnnnnnnnnnnnnnnnnnnnnnnnnnnnnnnnnnnnnnnnnnnnnnnnnnnnnnnnnnnnnnnnnnnnnnnnnnnnnnnnnnnnnnnnnnnnnnnnnnnnnnnnnnnnnnnnnnnnnnnnnnnnnnnnnnnnnnnnnnnnnnnnnnnnnnnnnnnnnnnnnnnnnnnnnnnnnnnnnnnnnnnnnnnnnnnnnnnnnnnnnnnnnnnnnnnnnnnnnnnnnnnnnnnnnnnnnnnnnnnnnnnnnnnnnnnnnnnnnnnnnnnnnnnnnnnnnnnnnnnnnnnnnnnnnnnnnnnnnnnnnnnnnnnnnnnnnnnnnnnnnnnnnnnnnnnnnnnnnnnnnnnnnnnnnnnnnnnnnnnnnnnnnnnnnnnnnnnnnnnnnnnnnnnnnnnnnnnnnnnnnnnnnnnnnnnnnnnnnnnnnnnnnnnnnnnnnnnnnnnnnnnnnnnnnnnnnnnnnnnnnnnnnnnnnnnnnnnnnnnnnnnnnnnnnnnnnnnnnnnnnnnnnnnnnnnnnnnnnnnnnnnnnnnnnnnnnnnnnnnnnnnnnnnnnnnnnnnnnnnnnnnnnnnnnnnnnnnnnnnnnnnnnnnnnnnnnnnnnnnnnnnnnnnnnnnnnnnnnnnnnnnnnnnnnnnnnnnnnnnnnnnnnnnnnnnnnnnnnnnnnnnnnnnnnnnnnnnnnnnnnnnnnnnnnnnnnnnnnnnnnnnnnnnnnnnnnnnnnnnnnnnnnnnnnnnnnnnnnnnnnnnnnnnnnnnnnnnnnnnnnnnnnnnnnnnnnnnnnnnnnnnnnnnnnnnnnnnnnnnnnnnnnnnnnnnnnnnnnnnnnnnnnnnnnnnnnnnnnnnnnnnnnnnnnnnnnnnnnnnnnnnnnnnnnnnnnnnnnnnnnnnnnnnnnnnnnnnnnnnnnnnnnnnnnnnnnnnnnnnnnnnnnnnnnnnnnnnnnnnnnnnnnnnnnnnnnnnnnnnnnnnnnnnnnnnnnnnnnnnnnnnnnnnnnnnnnnnnnnnnnnnnnnnnnnnnnnnnnnnnnnnnnnnnnnnnnnnnnnnnnnnnnnnnnnnnnnnnnnnnnnnnnnnnnnnnnnnnnnnnnnnnnnnnnnnnnnnnnnnnnnnnnnnnnnnnnnnnnnnnnnnnnnnnnnnnnnnnnnnnnnnnnnnnnnnnnnnnnnnnnnnnnnnnnnnnnnnnnnnnnnnnnnnnnnnnnnnnnnnnnnnnnnnnnnnnnnnnnnnnnnnnnnnnnnnnnnnnnnnnnnnnnnnnnnnnnnnnnnnnnnnnnnnnnnnnnnnnnnnnnnnnnnnnnnnnnnnnnnnnnnnnnnnnnnnnnnnnnnnnnnnnnnnnnnnnnnnnnnnnnnnnnnnnnnnnnnnnnnnnnnnnnnnnnnnnnnnnnnnnnnnnnnnnnnnnnnnnnnnnnnnnnnnnnnnnnnnnnnnnnnnnnnnnnnnnnnnnnnnnnnnnnnnnnnnnnnnnnnnnnnnnnnnnnnnnnnnnnnnnnnnnnnnnnnnnnnnnnnnnnnnnnnnnnnnnnnnnnnnnnnnnnnnnnnnnnnnnnnnnnnnnnnnnnnnnnnnnnnnnnnnnnnnnnnnnnnnnnnnnnnnnnnnnnnnnnnnnnnnnnnnnnnnnnnnnnnnnnnnnnnnnnnnnnnnnnnnnnnnnnnnnnnnnnnnnnnnnnnnnnnnnnnnnnnnnnnnnnnnnnnnnnnnnnnnnnnnnnnnnnnnnnnnnnnnnnnnnnnnnnnnnnnnnnnnnnnnnnnnnnnnnnnnnnnnnnnnnnnnnnnnnnnnnnnnnnnnnnnnnnnnnnnnnnnnnnnnnnnnnnnnnnnnnnnnnnnnnnnnnnnnnnnnnnnnnnnnnnnnnnnnnnnnnnnnnnnnnnnnnnnnnnnnnnnnnnnnnnnnnnnnnnnnnnnnnnnnnnnnnnnnnnnnnnnnnnnnnnnnnnnnnnnnnnnnnnnnnnnnnnnnnnnnnnnnnnnnnnnnnnnnnnnnnnnnnnnnnnnnnnnnnnnnnnnnnnnnnnnnnnnnnnnnnnnnnnnnnnnnnnnnnnnnnnnnnnnnnnnnnnnnnnnnnnnnnnnnnnnnnnnnnnnnnnnnnnnnnnnnnnnnnnnnnnnnnnnnnnnnnnnnnnnnnnnnnnnnnnnnnnnnnnnnnnnnnnnnnnnnnnnnnnnnnnnnnnnnnnnnnnnnnnnnnnnnnnnnnnnnnnnnnnnnnnnnnnnnnnnnnnnnnnnnnnnnnnnnnnnnnnnnnnnnnnnnnnnnnnnnnnnnnnnnnnnnnnnnnnnnnnnnnnnnnnnnnnnnnnnnnnnnnnnnnnnnnnnnnnnnnnnnnnnnnnnnnnnnnnnnnnnnnnnnnnnnnnnnnnnnnnnnnnnnnnnnnnnnnnnnnnnnnnnnnnnnnnnnnnnnnnnnnnnnnnnnnnnnnnnnnnnnnnnnnnnnnnnnnnnnnnnnnnnnnnnnnnnnnnnnnnnnnnnnnnnnnnnnnnnnnnnnnnnnnnnnnnnnnnnnnnnnnnnnnnnnnnnnnnnnnnnnnnnnnnnnnnnnnnnnnnnnnnnnnnnnnnnnnnnnnnnnnnnnnnnnnnnnnnnnnnnnnnnnnnnnnnnnnnnnnnnnnnnnnnnnnnnnnnnnnnnnnnnnnnnnnnnnnnnnnnnnnnnnnnnnnnnnnnnnnnnnnnnnnnnnnnnnnnnnnnnnnnnnnnnnnnnnnnnnnnnnnnnnnnnnnnnnnnnnnnnnnnnnnnnnnnnnnnnnnnnnnnnnnnnnnnnnnnnnnnnnnnnnnnnnnnnnnnnnnnnnnnnnnnnnnnnnnnnnnnnnnnnnnnnnnnnnnnnnnnnnnnnnnnnnnnnnnnnnnnnnnnnnnnnnnnnnnnnnnnnnnnnnnnnnnnnnnnnnnnnnnnnnnnnnnnnnnnnnnnnnnnnnnnnnnnnnnnnnnnnnnnnnnnnnnnnnnnnnnnnnnnnnnnnnnnnnnnnnnnnnnnnnnnnnnnnnnnnnnnnnnnnnnnnnnnnnnnnnnnnnnnnnnnnnnnnnnnnnnnnnnnnnnnnnnnnnnnnnnnnnnnnnnnnnnnnnnnnnnnnnnnnnnnnnnnnnnnnnnnnnnnnnnnnnnnnnnnnnnnnnnnnnnnnnnnnnnnnnnnnnnnnnnnnnnnnnnnnnnnnnnnnnnnnnnnnnnnnnnnnnnnnnnnnnnnnnnnnnnnnnnnnnnnnnnnnnnnnnnnnnnnnnnnnnnnnnnnnnnnnnnnnnnnnnnnnnnnnnnnnnnnnnnnnnnnnnnnnnnnnnnnnnnnnnnnnnnnnnnnnnnnnnnnnnnnnnnnnnnnnnnnnnnnnnnnnnnnnnnnnnnnnnnnnnnnnnnnnnnnnnnnnnnnnnnnnnnnnnnnnnnnnnnnnnnnnnnnnnnnnnnnnnnnnnnnnnnnnnnnnnnnnnnnnnnnnnnnnnnnnnnnnnnnnnnnnnnnnnnnnnnnnnnnnnnnnnnnnnnnnnnnnnnnnnnnnnnnnnnnnnnnnnnnnnnnnnnnnnnnnnnnnnnnnnnnnnnnnnnnnnnnnnnnnnnnnnnnnnnnnnnnnnnnnnnnnnnnnnnnnnnnnnnnnnnnnnnnnnnnnnnnnnnnnnnnnnnnnnnnnnnnnnnnnnnnnnnnnnnnnnnnnnnnnnnnnnnnnnnnnnnnnnnnnnnnnnnnnnnnnnnnnnnnnnnnnnnnnnnnnnnnnnnnnnnnnnnnnnnnnnnnnnnnnnnnnnnnnnnnnnnnnnnnnnnnnnnnnnnnnnnnnnnnnnnnnnnnnnnnnnnnnnnnnnnnnnnnnnnnnnnnnnnnnnnnnnnnnnnnnnnnnnnnnnnnnnnnnnnnnnnnnnnnnnnnnnnnnnnnnnnnnnnnnnnnnnnnnnnnnnnnnnnnnnnnnnnnnnnnnnnnnnnnnnnnnnnnnnnnnnnnnnnnnnnnnnnnnnnnnnnnnnnnnnnnnnnnnnnnnnnnnnnnnnnnnnnnnnnnnnnnnnnnnnnnnnnnnnnnnnnnnnnnnnnnnnnnnnnnnnnnnnnnnnnnnnnnnnnnnnnnnnnnnnnnnnnnnnnnnnnnnnnnnnnnnnnnnnnnnnnnnnnnnnnnnnnnnnnnnnnnnnnnnnnnnnnnnnnnnnnnnnnnnnnnnnnnnnnnnnnnnnnnnnnnnnnnnnnnnnnnnnnnnnnnnnnnnnnnnnnnnnnnnnnnnnnnnnnnnnnnnnnnnnnnnnnnnnnnnnnnnnnnnnnnnnnnnnnnnnnnnnnnnnnnnnnnnnnnnnnnnnnnnnnnnnnnnnnnnnnnnnnnnnnnnnnnnnnnnnnnnnnnnnnnnnnnnnnnnnnnnnnnnnnnnnnnnnnnnnnnnnnnnnnnnnnnnnnnnnnnnnnnnnnnnnnnnnnnnnnnnnnnnnnnnnnnnnnnnnnnnnnnnnnnnnnnnnnnnnnnnnnnnnnnnnnnnnnnnnnnnnnnnnnnnnnnnnnnnnnnnnnnnnnnnnnnnnnnnnnnnnnnnnnnnnnnnnnnnnnnnnnnnnnnnnnnnnnnnnnnnnnnnnnnnnnnnnnnnnnnnnnnnnnnnnnnnnnnnnnnnnnnnnnnnnnnnnnnnnnnnnnnnnnnnnnnnnnnnnnnnnnnnnnnnnnnnnnnnnnnnnnnnnnnnnnnnnnnnnnnnnnnnnnnnnnnnnnnnnnnnnnnnnnnnnnnnnnnnnnnnnnnnnnnnnnnnnnnnnnnnnnnnnnnnnnnnnnnnnnnnnnnnnnnnnnnnnnnnnnnnnnnnnnnnnnnnnnnnnnnnnnnnnnnnnnnnnnnnnnnnnnnnnnnnnnnnnnnnnnnnnnnnnnnnnnnnnnnnnnnnnnnnnnnnnnnnnnnnnnnnnnnnnnnnnnnnnnnnnnnnnnnnnnnnnnnnnnnnnnnnnnnnnnnnnnnnnnnnnnnnnnnnnnnnnnnnnnnnnnnnnnnnnnnnnnnnnnnnnnnnnnnnnnnnnnnnnnnnnnnnnnnnnnnnnnnnnnnnnnnnnnnnnnnnnnnnnnnnnnnnnnnnnnnnnnnnnnnnnnnnnnnnnnnnnnnnnnnnnnnnnnnnnnnnnnnnnnnnnnnnnnnnnnnnnnnnnnnnnnnnnnnnnnnnnnnnnnnnnnnnnnnnnnnnnnnnnnnnnnnnnnnnnnnnnnnnnnnnnnnnnnnnnnnnnnnnnnnnnnnnnnnnnnnnnnnnnnnnnnnnnnnnnnnnnnnnnnnnnnnnnnnnnnnnnnnnnnnnnnnnnnnnnnnnnnnnnnnnnnnnnnnnnnnnnnnnnnnnnnnnnnnnnnnnnnnnnnnnnnnnnnnnnnnnnnnnnnnnnnnnnnnnnnnnnnnnnnnnnnnnnnnnnnnnnnnnnnnnnnnnnnnnnnnnnnnnnnnnnnnnnnnnnnnnnnnnnnnnnnnnnnnnnnnnnnnnnnnnnnnnnnnnnnnnnnnnnnnnnnnnnnnnnnnnnnnnnnnnnnnnnnnnnnnnnnnnnnnnnnnnnnnnnnnnnnnnnnnnnnnnnnnnnnnnnnnnnnnnnnnnnnnnnnnnnnnnnnnnnnnnnnnnnnnnnnnnnnnnnnnnnnnnnnnnnnnnnnnnnnnnnnnnnnnnnnnnnnnnnnnnnnnnnnnnnnnnnnnnnnnnnnnnnnnnnnnnnnnnnnnnnnnnnnnnnnnnnnnnnnnnnnnnnnnnnnnnnnnnnnnnnnnnnnnnnnnnnnnnnnnnnnnnnnnnnnnnnnnnnnnnnnnnnnnnnnnnnnnnnnnnnnnnnnnnnnnnnnnnnnnnnnnnnnnnnnnnnnnnnnnnnnnnnnnnnnnnnnnnnnnnnnnnnnnnnnnnnnnnnnnnnnnnnnnnnnnnnnnnnnnnnnnnnnnnnnnnnnnnnnnnnnnnnnnnnnnnnnnnnnnnnnnnnnnnnnnnnnnnnnnnnnnnnnnnnnnnnnnnnnnnnnnnnnnnnnnnnnnnnnnnnnnnnnnnnnnnnnnnnnnnnnnnnnnnnnnnnnnnnnnnnnnnnnnnnnnnnnnnnnnnnnnnnnnnnnnnnnnnnnnnnnnnnnnnnnnnnnnnnnnnnnnnnnnnnnnnnnnnnnnnnnnnnnnnnnnnnnnnnnnnnnnnnnnnnnnnnnnnnnnnnnnnnnnnnnnnnnnnnnnnnnnnnnnnnnnnnnnnnnnnnnnnnnnnnnnnnnnnnnnnnnnnnnnnnnnnnnnnnnnnnnnnnnnnnnnnnnnnnnnnnnnnnnnnnnnnnnnnnnnnnnnnnnnnnnnnnnnnnnnnnnnnnnnnnnnnnnnnnnnnnnnnnnnnnnnnnnnnnnnnnnnnnnnnnnnnnnnnnnnnnnnnnnnnnnnnnnnnnnnnnnnnnnnnnnnnnnnnnnnnnnnnnnnnnnnnnnnnnnnnnnnnnnnnnnnnnnnnnnnnnnnnnnnnnnnnnnnnnnnnnnnnnnnnnnnnnnnnnnnnnnnnnnnnnnnnnnnnnnnnnnnnnnnnnnnnnnnnnnnnnnnnnnnnnnnnnnnnnnnnnnnnnnnnnnnnnnnnnnnnnnnnnnnnnnnnnnnnnnnnnnnnnnnnnnnnnnnnnnnnnnnnnnnnnnnnnnnnnnnnnnnnnnnnnnnnnnnnnnnnnnnnnnnnnnnnnnnnnnnnnnnnnnnnnnnnnnnnnnnnnnnnnnnnnnnnnnnnnnnnnnnnnnnnnnnnnnnnnnnnnnnnnnnnnnnnnnnnnnnnnnnnnnnnnnnnnnnnnnnnnnnnnnnnnnnnnnnnnnnnnnnnnnnnnnnnnnnnnnnnnnnnnnnnnnnnnnnnnnnnnnnnnnnnnnnnnnnnnnnnnnnnnnnnnnnnnnnnnnnnnnnnnnnnnnnnnnnnnnnnnnnnnnnnnnnnnnnnnnnnnnnnnnnnnnnnnnnnnnnnnnnnnnnnnnnnnnnnnnnnnnnnnnnnnnnnnnnnnnnnnnnnnnnnnnnnnnnnnnnnnnnnnnnnnnnnnnnnnnnnnnnnnnnnnnnnnnnnnnnnnnnnnnnnnnnnnnnnnnnnnnnnnnnnnnnnnnnnnnnnnnnnnnnnnnnnnnnnnnnnnnnnnnnnnnnnnnnnnnnnnnnnnnnnnnnnnnnnnnnnnnnnnnnnnnnnnnnnnnnnnnnnnnnnnnnnnnnnnnnnnnnnnnnnnnnnnnnnnnnnnnnnnnnnnnnnnnnnnnnnnnnnnnnnnnnnnnnnnnnnnnnnnnnnnnnnnnnnnnnnnnnnnnnnnnnnnnnnnnnnnnnnnnnnnnnnnnnnnnnnnnnnnnnnnnnnnnnnnnnnnnnnnnnnnnnnnnnnnnnnnnnnnnnnnnnnnnnnnnnnnnnnnnnnnnnnnnnnnnnnnnnnnnnnnnnnnnnnnnnnnnnnnnnnnnnnnnnnnnnnnnnnnnnnnnnnnnnnnnnnnnnnnnnnnnnnnnnnnnnnnnnnnnnnnnnnnnnnnnnnnnnnnnnnnnnnnnnnnnnnnnnnnnnnnnnnnnnnnnnnnnnnnnnnnnnnnnnnnnnnnnnnnnnnnnnnnnnnnnnnnnnnnnnnnnnnnnnnnnnnnnnnnnnnnnnnnnnnnnnnnnnnnnnnnnnnnnnnnnnnnnnnnnnnnnnnnnnnnnnnnnnnnnnnnnnnnnnnnnnnnnnnnnnnnnnnnnnnnnnnnnnnnnnnnnnnnnnnnnnnnnnnnnnnnnnnnnnnnnnnnnnnnnnnnnnnnnnnnnnnnnnnnnnnnnnnnnnnnnnnnnnnnnnnnnnnnnnnnnnnnnnnnnnnnnnnnnnnnnnnnnnnnnnnnnnnnnnnnnnnnnnnnnnnnnnnnnnnnnnnnnnnnnnnnnnnnnnnnnnnnnnnnnnnnnnnnnnnnnnnnnnnnnnnnnnnnnnnnnnnnnnnnnnnnnnnnnnnnnnnnnnnnnnnnnnnnnnnnnnnnnnnnnnnnnnnnnnnnnnnnnnnnnnnnnnnnnnnnnnnnnnnnnnnnnnnnnnnnnnnnnnnnnnnnnnnnnnnnnnnnnnnnnnnnnnnnnnnnnnnnnnnnnnnnnnnnnnnnnnnnnnnnnnnnnnnnnnnnnnnnnnnnnnnnnnnnnnnnnnnnnnnnnnnnnnnnnnnnnnnnnnnnnnnnnnnnnnnnnnnnnnnnnnnnnnnnnnnnnnnnnnnnnnnnnnnnnnnnnnnnnnnnnnnnnnnnnnnnnnnnnnnnnnnnnnnnnnnnnnnnnnnnnnnnnnnnnnnnnnnnnnnnnnnnnnnnnnnnnnnnnnnnnnnnnnnnnnnnnnnnnnnnnnnnnnnnnnnnnnnnnnnnnnnnnnnnnnnnnnnnnnnnnnnnnnnnnnnnnnnnnnnnnnnnnnnnnnnnnnnnnnnnnnnnnnnnnnnnnnnnnnnnnnnnnnnnnnnnnnnnnnnnnnnnnnnnnnnnnnnnnnnnnnnnnnnnnnnnnnnnnnnnnnnnnnnnnnnnnnnnnnnnnnnnnnnnnnnnnnnnnnnnnnnnnnnnnnnnnnnnnnnnnnnnnnnnnnnnnnnnnnnnnnnnnnnnnnnnnnnnnnnnnnnnnnnnnnnnnnnnnnnnnnnnnnnnnnnnnnnnnnnnnnnnnnnnnnnnnnnnnnnnnnnnnnnnnnnnnnnnnnnnnnnnnnnnnnnnnnnnnnnnnnnnnnnnnnnnnnnnnnnnnnnnnnnnnnnnnnnnnnnnnnnnnnnnnnnnnnnnnnnnnnnnnnnnnnnnnnnnnnnnnnnnnnnnnnnnnnnnnnnnnnnnnnnnnnnnnnnnnnnnnnnnnnnnnnnnnnnnnnnnnnnnnnnnnnnnnnnnnnnnnnnnnnnnnnnnnnnnnnnnnnnnnnnnnnnnnnnnnnnnnnnnnnnnnnnnnnnnnnnnnnnnnnnnnnnnnnnnnnnnnnnnnnnnnnnnnnnnnnnnnnnnnnnnnnnnnnnnnnnnnnnnnnnnnnnnnnnnnnnnnnnnnnnnnnnnnnnnnnnnnnnnnnnnnnnnnnnnnnnnnnnnnnnnnnnnnnnnnnnnnnnnnnnnnnnnnnnnnnnnnnnnnnnnnnnnnnnnnnnnnnnnnnnnnnnnnnnnnnnnnnnnnnnnnnnnnnnnnnnnnnnnnnnnnnnnnnnnnnnnnnnnnnnnnnnnnnnnnnnnnnnnnnnnnnnnnnnnnnnnnnnnnnnnnnnnnnnnnnnnnnnnnnnnnnnnnnnnnnnnnnnnnnnnnnnnnnnnnnnnnnnnnnnnnnnnnnnnnnnnnnnnnnnnnnnnnnnnnnnnnnnnnnnnnnnnnnnnnnnnnnnnnnnnnnnnnnnnnnnnnnnnnnnnnnnnnnnnnnnnnnnnnnnnnnnnnnnnnnnnnnnnnnnnnnnnnnnnnnnnnnnnnnnnnnnnnnnnnnnnnnnnnnnnnnnnnnnnnnnnnnnnnnnnnnnnnnnnnnnnnnnnnnnnnnnnnnnnnnnnnnnnnnnnnnnnnnnnnnnnnnnnnnnnnnnnnnnnnnnnnnnnnnnnnnnnnnnnnnnnnnnnnnnnnnnnnnnnnnnnnnnnnnnnnnnnnnnnnnnnnnnnnnnnnnnnnnnnnnnnnnnnnnnnnnnnnnnnnnnnnnnnnnnnnnnnnnnnnnnnnnnnnnnnnnnnnnnnnnnnnnnnnnnnnnnnnnnnnnnnnnnnnnnnnnnnnnnnnnnnnnnnnnnnnnnnnnnnnnnnnnnnnnnnnnnnnnnnnnnnnnnnnnnnnnnnnnnnnnnnnnnnnnnnnnnnnnnnnnnnnnnnnnnnnnnnnnnnnnnnnnnnnnnnnnnnnnnnnnnnnnnnnnnnnnnnnnnnnnnnnnnnnnnnnnnnnnnnnnnnnnnnnnnnnnnnnnnnnnnnnnnnnnnnnnnnnnnnnnnnnnnnnnnnnnnnnnnnnnnnnnnnnnnnnnnnnnnnnnnnnnnnnnnnnnnnnnnnnnnnnnnnnnnnnnnnnnnnnnnnnnnnnnnnnnnnnnnnnnnnnnnnnnnnnnnnnnnnnnnnnnnnnnnnnnnnnnnnnnnnnnnnnnnnnnnnnnnnnnnnnnnnnnnnnnnnnnnnnnnnnnnnnnnnnnnnnnnnnnnnnnnnnnnnnnnnnnnnnnnnnnnnnnnnnnnnnnnnnnnnnnnnnnnnnnnnnnnnnnnnnnnnnnnnnnnnnnnnnnnnnnnnnnnnnnnnnnnnnnnnnnnnnnnnnnnnnnnnnnnnnnnnnnnnnnnnnnnnnnnnnnnnnnnnnnnnnnnnnnnnnnnnnnnnnnnnnnnnnnnnnnnnnnnnnnnnnnnnnnnnnnnnnnnnnnnnnnnnnnnnnnnnnnnnnnnnnnnnnnnnnnnnnnnnnnnnnnnnnnnnnnnnnnnnnnnnnnnnnnnnnnnnnnnnnnnnnnnnnnnnnnnnnnnnnnnnnnnnnnnnnnnnnnnnnnnnnnnnnnnnnnnnnnnnnnnnnnnnnnnnnnnnnnnnnnnnnnnnnnnnnnnnnnnnnnnnnnnnnnnnnnnnnnnnnnnnnnnnnnnnnnnnnnnnnnnnnnnnnnnnnnnnnnnnnnnnnnnnnnnnnnnnnnnnnnnnnnnnnnnnnnnnnnnnnnnnnnnnnnnnnnnnnnnnnnnnnnnnnnnnnnnnnnnnnnnnnnnnnnnnnnnnnnnnnnnnnnnnnnnnnnnnnnnnnnnnnnnnnnnnnnnnnnnnnnnnnnnnnnnnnnnnnnnnnnnnnnnnnnnnnnnnnnnnnnnnnnnnnnnnnnnnnnnnnnnnnnnnnnnnnnnnnnnnnnnnnnnnnnnnnnnnnnnnnnnnnnnnnnnnnnnnnnnnnnnnnnnnnnnnnnnnnnnnnnnnnnnnnnnnnnnnnnnnnnnnnnnnnnnnnnnnnnnnnnnnnnnnnnnnnnnnnnnnnnnnnnnnnnnnnnnnnnnnnnnnnnnnnnnnnnnnnnnnnnnnnnnnnnnnnnnnnnnnnnnnnnnnnnnnnnnnnnnnnnnnnnnnnnnnnnnnnnnnnnnnnnnnnnnnnnnnnnnnnnnnnnnnnnnnnnnnnnnnnnnnnnnnnnnnnnnnnnnnnnnnnnnnnnnnnnnnnnnnnnnnnnnnnnnnnnnnnnnnnnnnnnnnnnnnnnnnnnnnnnnnnnnnnnnnnnnnnnnnnnnnnnnnnnnnnnnnnnnnnnnnnnnnnnnnnnnnnnnnnnnnnnnnnnnnnnnnnnnnnnnnnnnnnnnnnnnnnnnnnnnnnnnnnnnnnnnnnnnnnnnnnnnnnnnnnnnnnnnnnnnnnnnnnnnnnnnnnnnnnnnnnnnnnnnnnnnnnnnnnnnnnnnnnnnnnnnnnnnnnnnnnnnnnnnnnnnnnnnnnnnnnnnnnnnnnnnnnnnnnnnnnnnnnnnnnnnnnnnnnnnnnnnnnnnnnnnnnnnnnnnnnnnnnnnnnnnnnnnnnnnnnnnnnnnnnnnnnnnnnnnnnnnnnnnnnnnnnnnnnnnnnnnnnnnnnnnnnnnnnnnnnnnnnnnnnnnnnnnnnnnnnnnnnnnnnnnnnnnnnnnnnnnnnnnnnnnnnnnnnnnnnnnnnnnnnnnnnnnnnnnnnnnnnnnnnnnnnnnnnnnnnnnnnnnnnnnnnnnnnnnnnnnnnnnnnnnnnnnnnnnnnnnnnnnnnnnnnnnnnnnnnnnnnnnnnnnnnnnnnnnnnnnnnnnnnnnnnnnnnnnnnnnnnnnnnnnnnnnnnnnnnnnnnnnnnnnnnnnnnnnnnnnnnnnnnnnnnnnnnnnnnnnnnnnnnnnnnnnnnnnnnnnnnnnnnnnnnnnnnnnnnnnnnnnnnnnnnnnnnnnnnnnnnnnnnnnnnnnnnnnnnnnnnnnnnnnnnnnnnnnnnnnnnnnnnnnnnnnnnnnnnnnnnnnnnnnnnnnnnnnnnnnnnnnnnnnnnnnnnnnnnnnnnnnnnnnnnnnnnnnnnnnnnnnnnnnnnnnnnnnnnnnnnnnnnnnnnnnnnnnnnnnnnnnnnnnnnnnnnnnnnnnnnnnnnnnnnnnnnnnnnnnnnnnnnnnnnnnnnnnnnnnnnnnnnnnnnnnnnnnnnnnnnnnnnnnnnnnnnnnnnnnnnnnnnnnnnnnnnnnnnnnnnnnnnnnnnnnnnnnnnnnnnnnnnnnnnnnnnnnnnnnnnnnnnnnnnnnnnnnnnnnnnnnnnnnnnnnnnnnnnnnnnnnnnnnnnnnnnnnnnnnnnnnnnnnnnnnnnnnnnnnnnnnnnnnnnnnnnnnnnnnnnnnnnnnnnnnnnnnnnnnnnnnnnnnnnnnnnnnnnnnnnnnnnnnnnnnnnnnnnnnnnnnnnnnnnnnnnnnnnnnnnnnnnnnnnnnnnnnnnnnnnnnnnnnnnnnnnnnnnnnnnnnnnnnnnnnnnnnnnnnnnnnnnnnnnnnnnnnnnnnnnnnnnnnnnnnnnnnnnnnnnnnnnnnnnnnnnnnnnnnnnnnnnnnnnnnnnnnnnnnnnnnnnnnnnnnnnnnnnnnnnnnnnnnnnnnnnnnnnnnnnnnnnnnnnnnnnnnnnnnnnnnnnnnnnnnnnnnnnnnnnnnnnnnnnnnnnnnnnnnnnnnnnnnnnnnnnnnnnnnnnnnnnnnnnnnnnnnnnnnnnnnnnnnnnnnnnnnnnnnnnnnnnnnnnnnnnnnnnnnnnnnnnnnnnnnnnnnnnnnnnnnnnnnnnnnnnnnnnnnnnnnnnnnnnnnnnnnnnnnnnnnnnnnnnnnnnnnnnnnnnnnnnnnnnnnnnnnnnnnnnnnnnnnnnnnnnnnnnnnnnnnnnnnnnnnnnnnnnnnnnnnnnnnnnnnnnnnnnnnnnnnnnnnnnnnnnnnnnnnnnnnnnnnnnnnnnnnnnnnnnnnnnnnnnnnnnnnnnnnnnnnnnnnnnnnnnnnnnnnnnnnnnnnnnnnnnnnnnnnnnnnnnnnnnnnnnnnnnnnnnnnnnnnnnnnnnnnnnnnnnnnnnnnnnnnnnnnnnnnnnnnnnnnnnnnnnnnnnnnnnnnnnnnnnnnnnnnnnnnnnnnnnnnnnnnnnnnnnnnnnnnnnnnnnnnnnnnnnnnnnnnnnnnnnnnnnnnnnnnnnnnnnnnnnnnnnnnnnnnnnnnnnnnnnnnnnnnnnnnnnnnnnnnnnnnnnnnnnnnnnnnnnnnnnnnnnnnnnnnnnnnnnnnnnnnnnnnnnnnnnnnnnnnnnnnnnnnnnnnnnnnnnnnnnnnnnnnnnnnnnnnnnnnnnnnnnnnnnnnnnnnnnnnnnnnnnnnnnnnnnnnnnnnnnnnnnnnnnnnnnnnnnnnnnnnnnnnnnnnnnnnnnnnnnnnnnnnnnnnnnnnnnnnnnnnnnnnnnnnnnnnnnnnnnnnnnnnnnnnnnnnnnnnnnnnnnnnnnnnnnnnnnnnnnnnnnnnnnnnnnnnnnnnnnnnnnnnnnnnnnnnnnnnnnnnnnnnnnnnnnnnnnnnnnnnnnnnnnnnnnnnnnnnnnnnnnnnnnnnnnnnnnnnnnnnnnnnnnnnnnnnnnnnnnnnnnnnnnnnnnnnnnnnnnnnnnnnnnnnnnnnnnnnnnnnnnnnnnnnnnnnnnnnnnnnnnnnnnnnnnnnnnnnnnnnnnnnnnnnnnnnnnnnnnnnnnnnnnnnnnnnnnnnnnnnnnnnnnnnnnnnnnnnnnnnnnnnnnnnnnnnnnnnnnnnnnnnnnnnnnnnnnnnnnnnnnnnnnnnnnnnnnnnnnnnnnnnnnnnnnnnnnnnnnnnnnnnnnnnnnnnnnnnnnnnnnnnnnnnnnnnnnnnnnnnnnnnnnnnnnnnnnnnnnnnnnnnnnnnnnnnnnnnnnnnnnnnnnnnnnnnnnnnnnnnnnnnnnnnnnnnnnnnnnnnnnnnnnnnnnnnnnnnnnnnnnnnnnnnnnnnnnnnnnnnnnnnnnnnnnnnnnnnnnnnnnnnnnnnnnnnnnnnnnnnnnnnnnnnnnnnnnnnnnnnnnnnnnnnnnnnnnnnnnnnnnnnnnnnnnnnnnnnnnnnnnnnnnnnnnnnnnnnnnnnnnnnnnnnnnnnnnnnnnnnnnnnnnnnnnnnnnnnnnnnnnnnnnnnnnnnnnnnnnnnnnnnnnnnnnnnnnnnnnnnnnnnnnnnnnnnnnnnnnnnnnnnnnnnnnnnnnnnnnnnnnnnnnnnnnnnnnnnnnnnnnnnnnnnnnnnnnnnnnnnnnnnnnnnnnnnnnnnnnnnnnnnnnnnnnnnnnnnnnnnnnnnnnnnnnnnnnnnnnnnnnnnnnnnnnnnnnnnnnnnnnnnnnnnnnnnnnnnnnnnnnnnnnnnnnnnnnnnnnnnnnnnnnnnnnnnnnnnnnnnnnnnnnnnnnnnnnnnnnnnnnnnnnnnnnnnnnnnnnnnnnnnnnnnnnnnnnnnnnnnnnnnnnnnnnnnnnnnnnnnnnnnnnnnnnnnnnnnnnnnnnnnnnnnnnnnnnnnnnnnnnnnnnnnnnnnnnnnnnnnnnnnnnnnnnnnnnnnnnnnnnnnnnnnnnnnnnnnnnnnnnnnnnnnnnnnnnnnnnnnnnnnnnnnnnnnnnnnnnnnnnnnnnnnnnnnnnnnnnnnnnnnnnnnnnnnnnnnnnnnnnnnnnnnnnnnnnnnnnnnnnnnnnnnnnnnnnnnnnnnnnnnnnnnnnnnnnnnnnnnnnnnnnnnnnnnnnnnnnnnnnnnnnnnnnnnnnnnnnnnnnnnnnnnnnnnnnnnnnnnnnnnnnnnnnnnnnnnnnnnnnnnnnnnnnnnnnnnnnnnnnnnnnnnnnnnnnnnnnnnnnnnnnnnnnnnnnnnnnnnnnnnnnnnnnnnnnnnnnnnnnnnnnnnnnnnnnnnnnnnnnnnnnnnnnnnnnnnnnnnnnnnnnnnnnnnnnnnnnnnnnnnnnnnnnnnnnnnnnnnnnnnnnnnnnnnnnnnnnnnnnnnnnnnnnnnnnnnnnnnnnnnnnnnnnnnnnnnnnnnnnnnnnnnnnnnnnnnnnnnnnnnnnnnnnnnnnnnnnnnnnnnnnnnnnnnnnnnnnnnnnnnnnnnnnnnnnnnnnnnnnnnnnnnnnnnnnnnnnnnnnnnnnnnnnnnnnnnnnnnnnnnnnnnnnnnnnnnnnnnnnnnnnnnnnnnnnnnnnnnnnnnnnnnnnnnnnnnnnnnnnnnnnnnnnnnnnnnnnnnnnnnnnnnnnnnnnnnnnnnnnnnnnnnnnnnnnnnnnnnnnnnnnnnnnnnnnnnnnnnnnnnnnnnnnnnnnnnnnnnnnnnnnnnnnnnnnnnnnnnnnnnnnnnnnnnnnnnnnnnnnnnnnnnnnnnnnnnnnnnnnnnnnnnnnnnnnnnnnnnnnnnnnnnnnnnnnnnnnnnnnnnnnnnnnnnnnnnnnnnnnnnnnnnnnnnnnnnnnnnnnnnnnnnnnnnnnnnnnnnnnnnnnnnnnnnnnnnnnnnnnnnnnnnnnnnnnnnnnnnnnnnnnnnnnnnnnnnnnnnnnnnnnnnnnnnnnnnnnnnnnnnnnnnnnnnnnnnnnnnnnnnnnnnnnnnnnnnnnnnnnnnnnnnnnnnnnnnnnnnnnnnnnnnnnnnnnnnnnnnnnnnnnnnnnnnnnnnnnnnnnnnnnnnnnnnnnnnnnnnnnnnnnnnnnnnnnnnnnnnnnnnnnnnnnnnnnnnnnnnnnnnnnnnnnnnnnnnnnnnnnnnnnnnnnnnnnnnnnnnnnnnnnnnnnnnnnnnnnnnnnnnnnnnnnnnnnnnnnnnnnnnnnnnnnnnnnnnnnnnnnnnnnnnnnnnnnnnnnnnnnnnnnnnnnnnnnnnnnnnnnnnnnnnnnnnnnnnnnnnnnnnnnnnnnnnnnnnnnnnnnnnnnnnnnnnnnnnnnnnnnnnnnnnnnnnnnnnnnnnnnnnnnnnnnnnnnnnnnnnnnnnnnnnnnnnnnnnnnnnnnnnnnnnnnnnnnnnnnnnnnnnnnnnnnnnnnnnnnnnnnnnnnnnnnnnnnnnnnnnnnnnnnnnnnnnnnnnnnnnnnnnnnnnnnnnnnnnnnnnnnnnnnnnnnnnnnnnnnnnnnnnnnnnnnnnnnnnnnnnnnnnnnnnnnnnnnnnnnnnnnnnnnnnnnnnnnnnnnnnnnnnnnnnnnnnnnnnnnnnnnnnnnnnnnnnnnnnnnnnnnnnnnnnnnnnnnnnnnnnnnnnnnnnnnnnnnnnnnnnnnnnnnnnnnnnnnnnnnnnnnnnnnnnnnnnnnnnnnnnnnnnnnnnnnnnnnnnnnnnnnnnnnnnnnnnnnnnnnnnnnnnnnnnnnnnnnnnnnnnnnnnnnnnnnnnnnnnnnnnnnnnnnnnnnnnnnnnnnnnnnnnnnnnnnnnnnnnnnnnnnnnnnnnnnnnnnnnnnnnnnnnnnnnnnnnnnnnnnnnnnnnnnnnnnnnnnnnnnnnnnnnnnnnnnnnnnnnnnnnnnnnnnnnnnnnnnnnnnnnnnnnnnnnnnnnnnnnnnnnnnnnnnnnnnnnnnnnnnnnnnnnnnnnnnnnnnnnnnnnnnnnnnnnnnnnnnnnnnnnnnnnnnnnnnnnnnnnnnnnnnnnnnnnnnnnnnnnnnnnnnnnnnnnnnnnnnnnnnnnnnnnnnnnnnnnnnnnnnnnnnnnnnnnnnnnnnnnnnnnnnnnnnnnnnnnnnnnnnnnnnnnnnnnnnnnnnnnnnnnnnnnnnnnnnnnnnnnnnnnnnnnnnnnnnnnnnnnnnnnnnnnnnnnnnnnnnnnnnnnnnnnnnnnnnnnnnnnnnnnnnnnnnnnnnnnnnnnnnnnnnnnnnnnnnnnnnnnnnnnnnnnnnnnnnnnnnnnnnnnnnnnnnnnnnnnnnnnnnnnnnnnnnnnnnnnnnnnnnnnnnnnnnnnnnnnnnnnnnnnnnnnnnnnnnnnnnnnnnnnnnnnnnnnnnnnnnnnnnnnnnnnnnnnnnnnnnnnnnnnnnnnnnnnnnnnnnnnnnnnnnnnnnnnnnnnnnnnnnnnnnnnnnnnnnnnnnnnnnnnnnnnnnnnnnnnnnnnnnnnnnnnnnnnnnnnnnnnnnnnnnnnnnnnnnnnnnnnnnnnnnnnnnnnnnnnnnnnnnnnnnnnnnnnnnnnnnnnnnnnnnnnnnnnnnnnnnnnnnnnnnnnnnnnnnnnnnnnnnnnnnnnnnnnnnnnnnnnnnnnnnnnnnnnnnnnnnnnnnnnnnnnnnnnnnnnnnnnnnnnnnnnnnnnnnnnnnnnnnnnnnnnnnnnnnnnnnnnnnnnnnnnnnnnnnnnnnnnnnnnnnnnnnnnnnnnnnnnnnnnnnnnnnnnnnnnnnnnnnnnnnnnnnnnnnnnnnnnnnnnnnnnnnnnnnnnnnnnnnnnnnnnnnnnnnnnnnnnnnnnnnnnnnnnnnnnnnnnnnnnnnnnnnnnnnnnnnnnnnnnnnnnnnnnnnnnnnnnnnnnnnnnnnnnnnnnnnnnnnnnnnnnnnnnnnnnnnnnnnnnnnnnnnnnnnnnnnnnnnnnnnnnnnnnnnnnnnnnnnnnnnnnnnnnnnnnnnnnnnnnnnnnnnnnnnnnnnnnnnnnnnnnnnnnnnnnnnnnnnnnnnnnnnnnnnnnnnnnnnnnnnnnnnnnnnnnnnnnnnnnnnnnnnnnnnnnnnnnnnnnnnnnnnnnnnnnnnnnnnnnnnnnnnnnnnnnnnnnnnnnnnnnnnnnnnnnnnnnnnnnnnnnnnnnnnnnnnnnnnnnnnnnnnnnnnnnnnnnnnnnnnnnnnnnnnnnnnnnnnnnnnnnnnnnnnnnnnnnnnnnnnnnnnnnnnnnnnnnnnnnnnnnnnnnnnnnnnnnnnnnnnnnnnnnnnnnnnnnnnnnnnnnnnnnnnnnnnnnnnnnnnnnnnnnnnnnnnnnnnnnnnnnnnnnnnnnnnnnnnnnnnnnnnnnnnnnnnnnnnnnnnnnnnnnnnnnnnnnnnnnnnnnnnnnnnnnnnnnnnnnnnnnnnnnnnnnnnnnnnnnnnnnnnnnnnnnnnnnnnnnnnnnnnnnnnnnnnnnnnnnnnnnnnnnnnnnnnnnnnnnnnnnnnnnnnnnnnnnnnnnnnnnnnnnnnnnnnnnnnnnnnnnnnnnnnnnnnnnnnnnnnnnnnnnnnnnnnnnnnnnnnnnnnnnnnnnnnnnnnnnnnnnnnnnnnnnnnnnnnnnnnnnnnnnnnnnnnnnnnnnnnnnnnnnnnnnnnnnnnnnnnnnnnnnnnnnnnnnnnnnnnnnnnnnnnnnnnnnnnnnnnnnnnnnnnnnnnnnnnnnnnnnnnnnnnnnnnnnnnnnnnnnnnnnnnnnnnnnnnnnnnnnnnnnnnnnnnnnnnnnnnnnnnnnnnnnnnnnnnnnnnnnnnnnnnnnnnnnnnnnnnnnnnnnnnnnnnnnnnnnnnnnnnnnnnnnnnnnnnnnnnnnnnnnnnnnnnnnnnnnnnnnnnnnnnnnnnnnnnnnnnnnnnnnnnnnnnnnnnnnnnnnnnnnnnnnnnnnnnnnnnnnnnnnnnnnnnnnnnnnnnnnnnnnnnnnnnnnnnnnnnnnnnnnnnnnnnnnnnnnnnnnnnnnnnnnnnnnnnnnnnnnnnnnnnnnnnnnnnnnnnnnnnnnnnnnnnnnnnnnnnnnnnnnnnnnnnnnnnnnnnnnnnnnnnnnnnnnnnnnnnnnnnnnnnnnnnnnnnnnnnnnnnnnnnnnnnnnnnnnnnnnnnnnnnnnnnnnnnnnnnnnnnnnnnnnnnnnnnnnnnnnnnnnnnnnnnnnnnnnnnnnnnnnnnnnnnnnnnnnnnnnnnnnnnnnnnnnnnnnnnnnnnnnnnnnnnnnnnnnnnnnnnnnnnnnnnnnnnnnnnnnnnnnnnnnnnnnnnnnnnnnnnnnnnnnnnnnnnnnnnnnnnnnnnnnnnnnnnnnnnnnnnnnnnnnnnnnnnnnnnnnnnnnnnnnnnnnnnnnnnnnnnnnnnnnnnnnnnnnnnnnnnnnnnnnnnnnnnnnnnnnnnnnnnnnnnnnnnnnnnnnnnnnnnnnnnnnnnnnnnnnnnnnnnnnnnnnnnnnnnnnnnnnnnnnnnnnnnnnnnnnnnnnnnnnnnnnnnnnnnnnnnnnnnnnnnnnnnnnnnnnnnnnnnnnnnnnnnnnnnnnnnnnnnnnnnnnnnnnnnnnnnnnnnnnnnnnnnnnnnnnnnnnnnnnnnnnnnnnnnnnnnnnnnnnnnnnnnnnnnnnnnnnnnnnnnnnnnnnnnnnnnnnnnnnnnnnnnnnnnnnnnnnnnnnnnnnnnnnnnnnnnnnnnnnnnnnnnnnnnnnnnnnnnnnnnnnnnnnnnnnnnnnnnnnnnnnnnnnnnnnnnnnnnnnnnnnnnnnnnnnnnnnnnnnnnnnnnnnnnnnnnnnnnnnnnnnnnnnnnnnnnnnnnnnnnnnnnnnnnnnnnnnnnnnnnnnnnnnnnnnnnnnnnnnnnnnnnnnnnnnnnnnnnnnnnnnnnnnnnnnnnnnnnnnnnnnnnnnnnnnnnnnnnnnnnnnnnnnnnnnnnnnnnnnnnnnnnnnnnnnnnnnnnnnnnnnnnnnnnnnnnnnnnnnnnnnnnnnnnnnnnnnnnnnnnnnnnnnnnnnnnnnnnnnnnnnnnnnnnnnnnnnnnnnnnnnnnnnnnnnnnnnnnnnnnnnnnnnnnnnnnnnnnnnnnnnnnnnnnnnnnnnnnnnnnnnnnnnnnnnnnnnnnnnnnnnnnnnnnnnnnnnnnnnnnnnnnnnnnnnnnnnnnnnnnnnnnnnnnnnnnnnnnnnnnnnnnnnnnnnnnnnnnnnnnnnnnnnnnnnnnnnnnnnnnnnnnnnnnnnnnnnnnnnnnnnnnnnnnnnnnnnnnnnnnnnnnnnnnnnnnnnnnnnnnnnnnnnnnnnnnnnnnnnnnnnnnnnnnnnnnnnnnnnnnnnnnnnnnnnnnnnnnnnnnnnnnnnnnnnnnnnnnnnnnnnnnnnnnnnnnnnnnnnnnnnnnnnnnnnnnnnnnnnnnnnnnnnnnnnnnnnnnnnnnnnnnnnnnnnnnnnnnnnnnnnnnnnnnnnnnnnnnnnnnnnnnnnnnnnnnnnnnnnnnnnnnnnnnnnnnnnnnnnnnnnnnnnnnnnnnnnnnnnnnnnnnnnnnnnnnnnnnnnnnnnnnnnnnnnnnnnnnnnnnnnnnnnnnnnnnnnnnnnnnnnnnnnnnnnnnnnnnnnnnnnnnnnnnnnnnnnnnnnnnnnnnnnnnnnnnnnnnnnnnnnnnnnnnnnnnnnnnnnnnnnnnnnnnnnnnnnnnnnnnnnnnnnnnnnnnnnnnnnnnnnnnnnnnnnnnnnnnnnnnnnnnnnnnnnnnnnnnnnnnnnnnnnnnnnnnnnnnnnnnnnnnnnnnnnnnnnnnnnnnnnnnnnnnnnnnnnnnnnnnnnnnnnnnnnnnnnnnnnnnnnnnnnnnnnnnnnnnnnnnnnnnnnnnnnnnnnnnnnnnnnnnnnnnnnnnnnnnnnnnnnnnnnnnnnnnnnnnnnnnnnnnnnnnnnnnnnnnnnnnnnnnnnnnnnnnnnnnnnnnnnnnnnnnnnnnnnnnnnnnnnnnnnnnnnnnnnnnnnnnnnnnnnnnnnnnnnnnnnnnnnnnnnnnnnnnnnnnnnnnnnnnnnnnnnnnnnnnnnnnnnnnnnnnnnnnnnnnnnnnnnnnnnnnnnnnnnnnnnnnnnnnnnnnnnnnnnnnnnnnnnnnnnnnnnnnnnnnnnnnnnnnnnnnnnnnnnnnnnnnnnnnnnnnnnnnnnnnnnnnnnnnnnnnnnnnnnnnnnnnnnnnnnnnnnnnnnnnnnnnnnnnnnnnnnnnnnnnnnnnnnnnnnnnnnnnnnnnnnnnnnnnnnnnnnnnnnnnnnnnnnnnnnnnnnnnnnnnnnnnnnnnnnnnnnnnnnnnnnnnnnnnnnnnnnnnnnnnnnnnnnnnnnnnnnnnnnnnnnnnnnnnnnnnnnnnnnnnnnnnnnnnnnnnnnnnnnnnnnnnnnnnnnnnnnnnnnnnnnnnnnnnnnnnnnnnnnnnnnnnnnnnnnnnnnnnnnnnnnnnnnnnnnnnnnnnnnnnnnnnnnnnnnnnnnnnnnnnnnnnnnnnnnnnnnnnnnnnnnnnnnnnnnnnnnnnnnnnnnnnnnnnnnnnnnnnnnnnnnnnnnnnnnnnnnnnnnnnnnnnnnnnnnnnnnnnnnnnnnnnnnnnnnnnnnnnnnnnnnnnnnnnnnnnnnnnnnnnnnnnnnnnnnnnnnnnnnnnnnnnnnnnnnnnnnnnnnnnnnnnnnnnnnnnnnnnnnnnnnnnnnnnnnnnnnnnnnnnnnnnnnnnnnnnnnnnnnnnnnnnnnnnnnnnnnnnnnnnnnnnnnnnnnnnnnnnnnnnnnnnnnnnnnnnnnnnnnnnnnnnnnnnnnnnnnnnnnnnnnnnnnnnnnnnnnnnnnnnnnnnnnnnnnnnnnnnnnnnnnnnnnnnnnnnnnnnnnnnnnnnnnnnnnnnnnnnnnnnnnnnnnnnnnnnnnnnnnnnnnnnnnnnnnnnnnnnnnnnnnnnnnnnnnnnnnnnnnnnnnnnnnnnnnnnnnnnnnnnnnnnnnnnnnnnnnnnnnnnnnnnnnnnnnnnnnnnnnnnnnnnnnnnnnnnnnnnnnnnnnnnnnnnnnnnnnnnnnnnnnnnnnnnnnnnnnnnnnnnnnnnnnnnnnnnnnnnnnnnnnnnnnnnnnnnnnnnnnnnnnnnnnnnnnnnnnnnnnnnnnnnnnnnnnnnnnnnnnnnnnnnnnnnnnnnnnnnnnnnnnnnnnnnnnnnnnnnnnnnnnnnnnnnnnnnnnnnnnnnnnnnnnnnnnnnnnnnnnnnnnnnnnnnnnnnnnnnnnnnnnnnnnnnnnnnnnnnnnnnnnnnnnnnnnnnnnnnnnnnnnnnnnnnnnnnnnnnnnnnnnnnnnnnnnnnnnnnnnnnnnnnnnnnnnnnnnnnnnnnnnnnnnnnnnnnnnnnnnnnnnnnnnnnnnnnnnnnnnnnnnnnnnnnnnnnnnnnnnnnnnnnnnnnnnnnnnnnnnnnnnnnnnnnnnnnnnnnnnnnnnnnnnnnnnnnnnnnnnnnnnnnnnnnnnnnnnnnnnnnnnnnnnnnnnnnnnnnnnnnnnnnnnnnnnnnnnnnnnnnnnnnnnnnnnnnnnnnnnnnnnnnnnnnnnnnnnnnnnnnnnnnnnnnnnnnnnnnnnnnnnnnnnnnnnnnnnnnnnnnnnnnnnnnnnnnnnnnnnnnnnnnnnnnnnnnnnnnnnnnnnnnnnnnnnnnnnnnnnnnnnnnnnnnnnnnnnnnnnnnnnnnnnnnnnnnnnnnnnnnnnnnnnnnnnnnnnnnnnnnnnnnnnnnnnnnnnnnnnnnnnnnnnnnnnnnnnnnnnnnnnnnnnnnnnnnnnnnnnnnnnnnnnnnnnnnnnnnnnnnnnnnnnnnnnnnnnnnnnnnnnnnnnnnnnnnnnnnnnnnnnnnnnnnnnnnnnnnnnnnnnnnnnnnnnnnnnnnnnnnnnnnnnnnnnnnnnnnnnnnnnnnnnnnnnnnnnnnnnnnnnnnnnnnnnnnnnnnnnnnnnnnnnnnnnnnnnnnnnnnnnnnnnnnnnnnnnnnnnnnnnnnnnnnnnnnnnnnnnnnnnnnnnnnnnnnnnnnnnnnnnnnnnnnnnnnnnnnnnnnnnnnnnnnnnnnnnnnnnnnnnnnnnnnnnnnnnnnnnnnnnnnnnnnnnnnnnnnnnnnnnnnnnnnnnnnnnnnnnnnnnnnnnnnnnnnnnnnnnnnnnnnnnnnnnnnnnnnnnnnnnnnnnnnnnnnnnnnnnnnnnnnnnnnnnnnnnnnnnnnnnnnnnnnnnnnnnnnnnnnnnnnnnnnnnnnnnnnnnnnnnnnnnnnnnnnnnnnnnnnnnnnnnnnnnnnnnnnnnnnnnnnnnnnnnnnnnnnnnnnnnnnnnnnnnnnnnnnnnnnnnnnnnnnnnnnnnnnnnnnnnnnnnnnnnnnnnnnnnnnnnnnnnnnnnnnnnnnnnnnnnnnnnnnnnnnnnnnnnnnnnnnnnnnnnnnnnnnnnnnnnnnnnnnnnnnnnnnnnnnnnnnnnnnnnnnnnnnnnnnnnnnnnnnnnnnnnnnnnnnnnnnnnnnnnnnnnnnnnnnnnnnnnnnnnnnnnnnnnnnnnnnnnnnnnnnnnnnnnnnnnnnnnnnnnnnnnnnnnnnnnnnnnnnnnnnnnnnnnnnnnnnnnnnnnnnnnnnnnnnnnnnnnnnnnnnnnnnnnnnnnnnnnnnnnnnnnnnnnnnnnnnnnnnnnnnnnnnnnnnnnnnnnnnnnnnnnnnnnnnnnnnnnnnnnnnnnnnnnnnnnnnnnnnnnnnnnnnnnnnnnnnnnnnnnnnnnnnnnnnnnnnnnnnnnnnnnnnnnnnnnnnnnnnnnnnnnnnnnnnnnnnnnnnnnnnnnnnnnnnnnnnnnnnnnnnnnnnnnnnnnnnnnnnnnnnnnnnnnnnnnnnnnnnnnnnnnnnnnnnnnnnnnnnnnnnnnnnnnnnnnnnnnnnnnnnnnnnnnnnnnnnnnnnnnnnnnnnnnnnnnnnnnnnnnnnnnnnnnnnnnnnnnnnnnnnnnnnnnnnnnnnnnnnnnnnnnnnnnnnnnnnnnnnnnnnnnnnnnnnnnnnnnnnnnnnnnnnnnnnnnnnnnnnnnnnnnnnnnnnnnnnnnnnnnnnnnnnnnnnnnnnnnnnnnnnnnnnnnnnnnnnnnnnnnnnnnnnnnnnnnnnnnnnnnnnnnnnnnnnnnnnnnnnnnnnnnnnnnnnnnnnnnnnnnnnnnnnnnnnnnnnnnnnnnnnnnnnnnnnnnnnnnnnnnnnnnnnnnnnnnnnnnnnnnnnnnnnnnnnnnnnnnnnnnnnnnnnnnnnnnnnnnnnnnnnnnnnnnnnnnnnnnnnnnnnnnnnnnnnnnnnnnnnnnnnnnnnnnnnnnnnnnnnnnnnnnnnnnnnnnnnnnnnnnnnnnnnnnnnnnnnnnnnnnnnnnnnnnnnnnnnnnnnnnnnnnnnnnnnnnnnnnnnnnnnnnnnnnnnnnnnnnnnnnnnnnnnnnnnnnnnnnnnnnnnnnnnnnnnnnnnnnnnnnnnnnnnnnnnnnnnnnnnnnnnnnnnnnnnnnnnnnnnnnnnnnnnnnnnnnnnnnnnnnnnnnnnnnnnnnnnnnnnnnnnnnnnnnnnnnnnnnnnnnnnnnnnnnnnnnnnnnnnnnnnnnnnnnnnnnnnnnnnnnnnnnnnnnnnnnnnnnnnnnnnnnnnnnnnnnnnnnnnnnnnnnnnnnnnnnnnnnnnnnnnnnnnnnnnnnnnnnnnnnnnnnnnnnnnnnnnnnnnnnnnnnnnnnnnnnnnnnnnnnnnnnnnnnnnnnnnnnnnnnnnnnnnnnnnnnnnnnnnnnnnnnnnnnnnnnnnnnnnnnnnnnnnnnnnnnnnnnnnnnnnnnnnnnnnnnnnnnnnnnnnnnnnnnnnnnnnnnnnnnnnnnnnnnnnnnnnnnnnnnnnnnnnnnnnnnnnnnnnnnnnnnnnnnnnnnnnnnnnnnnnnnnnnnnnnnnnnnnnnnnnnnnnnnnnnnnnnnnnnnnnnnnnnnnnnnnnnnnnnnnnnnnnnnnnnnnnnnnnnnnnnnnnnnnnnnnnnnnnnnnnnnnnnnnnnnnnnnnnnnnnnnnnnnnnnnnnnnnnnnnnnnnnnnnnnnnnnnnnnnnnnnnnnnnnnnnnnnnnnnnnnnnnnnnnnnnnnnnnnnnnnnnnnnnnnnnnnnnnnnnnnnnnnnnnnnnnnnnnnnnnnnnnnnnnnnnnnnnnnnnnnnnnnnnnnnnnnnnnnnnnnnnnnnnnnnnnnnnnnnnnnnnnnnnnnnnnnnnnnnnnnnnnnnnnnnnnnnnnnnnnnnnnnnnnnnnnnnnnnnnnnnnnnnnnnnnnnnnnnnnnnnnnnnnnnnnnnnnnnnnnnnnnnnnnnnnnnnnnnnnnnnnnnnnnnnnnnnnnnnnnnnnnnnnnnnnnnnnnnnnnnnnnnnnnnnnnnnnnnnnnnnnnnnnnnnnnnnnnnnnnnnnnnnnnnnnnnnnnnnnnnnnnnnnnnnnnnnnnnnnnnnnnnnnnnnnnnnnnnnnnnnnnnnnnnnnnnnnnnnnnnnnnnnnnnnnnnnnnnnnnnnnnnnnnnnnnnnnnnnnnnnnnnnnnnnnnnnnnnnnnnnnnnnnnnnnnnnnnnnnnnnnnnnnnnnnnnnnnnnnnnnnnnnnnnnnnnnnnnnnnnnnnnnnnnnnnnnnnnnnnnnnnnnnnnnnnnnnnnnnnnnnnnnnnnnnnnnnnnnnnnnnnnnnnnnnnnnnnnnnnnnnnnnnnnnnnnnnnnnnnnnnnnnnnnnnnnnnnnnnnnnnnnnnnnnnnnnnnnnnnnnnnnnnnnnnnnnnnnnnnnnnnnnnnnnnnnnnnnnnnnnnnnnnnnnnnnnnnnnnnnnnnnnnnnnnnnnnnnnnnnnnnnnnnnnnnnnnnnnnnnnnnnnnnnnnnnnnnnnnnnnnnnnnnnnnnnnnnnnnnnnnnnnnnnnnnnnnnnnnnnnnnnnnnnnnnnnnnnnnnnnnnnnnnnnnnnnnnnnnnnnnnnnnnnnnnnnnnnnnnnnnnnnnnnnnnnnnnnnnnnnnnnnnnnnnnnnnnnnnnnnnnnnnnnnnnnnnnnnnnnnnnnnnnnnnnnnnnnnnnnnnnnnnnnnnnnnnnnnnnnnnnnnnnnnnnnnnnnnnnnnnnnnnnnnnnnnnnnnnnnnnnnnnnnnnnnnnnnnnnnnnnnnnnnnnnnnnnnnnnnnnnnnnnnnnnnnnnnnnnnnnnnnnnnnnnnnnnnnnnnnnnnnnnnnnnnnnnnnnnnnnnnnnnnnnnnnnnnnnnnnnnnnnnnnnnnnnnnnnnnnnnnnnnnnnnnnnnnnnnnnnnnnnnnnnnnnnnnnnnnnnnnnnnnnnnnnnnnnnnnnnnnnnnnnnnnnnnnnnnnnnnnnnnnnnnnnnnnnnnnnnnnnnnnnnnnnnnnnnnnnnnnnnnnnnnnnnnnnnnnnnnnnnnnnnnnnnnnnnnnnnnnnnnnnnnnnnnnnnnnnnnnnnnnnnnnnnnnnnnnnnnnnnnnnnnnnnnnnnnnnnnnnnnnnnnnnnnnnnnnnnnnnnnnnnnnnnnnnnnnnnnnnnnnnnnnnnnnnnnnnnnnnnnnnnnnnnnnnnnnnnnnnnnnnnnnnnnnnnnnnnnnnnnnnnnnnnnnnnnnnnnnnnnnnnnnnnnnnnnnnnnnnnnnnnnnnnnnnnnnnnnnnnnnnnnnnnnnnnnnnnnnnnnnnnnnnnnnnnnnnnnnnnnnnnnnnnnnnnnnnnnnnnnnnnnnnnnnnnnnnnnnnnnnnnnnnnnnnnnnnnnnnnnnnnnnnnnnnnnnnnnnnnnnnnnnnnnnnnnnnnnnnnnnnnnnnnnnnnnnnnnnnnnnnnnnnnnnnnnnnnnnnnnnnnnnnnnnnnnnnnnnnnnnnnnnnnnnnnnnnnnnnnnnnnnnnnnnnnnnnnnnnnnnnnnnnnnnnnnnnnnnnnnnnnnnnnnnnnnnnnnnnnnnnnnnnnnnnnnnnnnnnnnnnnnnnnnnnnnnnnnnnnnnnnnnnnnnnnnnnnnnnnnnnnnnnnnnnnnnnnnnnnnnnnnnnnnnnnnnnnnnnnnnnnnnnnnnnnnnnnnnnnnnnnnnnnnnnnnnnnnnnnnnnnnnnnnnnnnnnnnnnnnnnnnnnnnnnnnnnnnnnnnnnnnnnnnnnnnnnnnnnnnnnnnnnnnnnnnnnnnnnnnnnnnnnnnnnnnnnnnnnnnnnnnnnnnnnnnnnnnnnnnnnnnnnnnnnnnnnnnnnnnnnnnnnnnnnnnnnnnnnnnnnnnnnnnnnnnnnnnnnnnnnnnnnnnnnnnnnnnnnnnnnnnnnnnnnnnnnnnnnnnnnnnnnnnnnnnnnnnnnnnnnnnnnnnnnnnnnnnnnnnnnnnnnnnnnnnnnnnnnnnnnnnnnnnnnnnnnnnnnnnnnnnnnnnnnnnnnnnnnnnnnnnnnnnnnnnnnnnnnnnnnnnnnnnnnnnnnnnnnnnnnnnnnnnnnnnnnnnnnnnnnnnnnnnnnnnnnnnnnnnnnnnnnnnnnnnnnnnnnnnnnnnnnnnnnnnnnnnnnnnnnnnnnnnnnnnnnnnnnnnnnnnnnnnnnnnnnnnnnnnnnnnnnnnnnnnnnnnnnnnnnnnnnnnnnnnnnnnnnnnnnnnnnnnnnnnnnnnnnnnnnnnnnnnnnnnnnnnnnnnnnnnnnnnnnnnnnnnnnnnnnnnnnnnnnnnnnnnnnnnnnnnnnnnnnnnnnnnnnnnnnnnnnnnnnnnnnnnnnnnnnnnnnnnnnnnnnnnnnnnnnnnnnnnnnnnnnnnnnnnnnnnnnnnnnnnnnnnnnnnnnnnnnnnnnnnnnnnnnnnnnnnnnnnnnnnnnnnnnnnnnnnnnnnnnnnnnnnnnnnnnnnnnnnnnnnnnnnnnnnnnnnnnnnnnnnnnnnnnnnnnnnnnnnnnnnnnnnnnnnnnnnnnnnnnnnnnnnnnnnnnnnnnnnnnnnnnnnnnnnnnnnnnnnnnnnnnnnnnnnnnnnnnnnnnnnnnnnnnnnnnnnnnnnnnnnnnnnnnnnnnnnnnnnnnnnnnnnnnnnnnnnnnnnnnnnnnnnnnnnnnnnnnnnnnnnnnnnnnnnnnnnnnnnnnnnnnnnnnnnnnnnnnnnnnnnnnnnnnnnnnnnnnnnnnnnnnnnnnnnnnnnnnnnnnnnnnnnnnnnnnnnnnnnnnnnnnnnnnnnnnnnnnnnnnnnnnnnnnnnnnnnnnnnnnnnnnnnnnnnnnnnnnnnnnnnnnnnnnnnnnnnnnnnnnnnnnnnnnnnnnnnnnnnnnnnnnnnnnnnnnnnnnnnnnnnnnnnnnnnnnnnnnnnnnnnnnnnnnnnnnnnnnnnnnnnnnnnnnnnnnnnnnnnnnnnnnnnnnnnnnnnnnnnnnnnnnnnnnnnnnnnnnnnnnnnnnnnnnnnnnnnnnnnnnnnnnnnnnnnnnnnnnnnnnnnnnnnnnnnnnnnnnnnnnnnnnnnnnnnnnnnnnnnnnnnnnnnnnnnnnnnnnnnnnnnnnnnnnnnnnnnnnnnnnnnnnnnnnnnnnnnnnnnnnnnnnnnnnnnnnnnnnnnnnnnnnnnnnnnnnnnnnnnnnnnnnnnnnnnnnnnnnnnnnnnnnnnnnnnnnnnnnnnnnnnnnnnnnnnnnnnnnnnnnnnnnnnnnnnnnnnnnnnnnnnnnnnnnnnnnnnnnnnnnnnnnnnnnnnnnnnnnnnnnnnnnnnnnnnnnnnnnnnnnnnnnnnnnnnnnnnnnnnnnnnnnnnnnnnnnnnnnnnnnnnnnnnnnnnnnnnnnnnnnnnnnnnnnnnnnnnnnnnnnnnnnnnnnnnnnnnnnnnnnnnnnnnnnnnnnnnnnnnnnnnnnnnnnnnnnnnnnnnnnnnnnnnnnnnnnnnnnnnnnnnnnnnnnnnnnnnnnnnnnnnnnnnnnnnnnnnnnnnnnnnnnnnnnnnnnnnnnnnnnnnnnnnnnnnnnnnnnnnnnnnnnnnnnnnnnnnnnnnnnnnnnnnnnnnnnnnnnnnnnnnnnnnnnnnnnnnnnnnnnnnnnnnnnnnnnnnnnnnnnnnnnnnnnnnnnnnnnnnnnnnnnnnnnnnnnnnnnnnnnnnnnnnnnnnnnnnnnnnnnnnnnnnnnnnnnnnnnnnnnnnnnnnnnnnnnnnnnnnnnnnnnnnnnnnnnnnnnnnnnnnnnnnnnnnnnnnnnnnnnnnnnnnnnnnnnnnnnnnnnnnnnnnnnnnnnnnnnnnnnnnnnnnnnnnnnnnnnnnnnnnnnnnnnnnnnnnnnnnnnnnnnnnnnnnnnnnnnnnnnnnnnnnnnnnnnnnnnnnnnnnnnnnnnnnnnnnnnnnnnnnnnnnnnnnnnnnnnnnnnnnnnnnnnnnnnnnnnnnnnnnnnnnnnnnnnnnnnnnnnnnnnnnnnnnnnnnnnnnnnnnnnnnnnnnnnnnnnnnnnnnnnnnnnnnnnnnnnnnnnnnnnnnnnnnnnnnnnnnnnnnnnnnnnnnnnnnnnnnnnnnnnnnnnnnnnnnnnnnnnnnnnnnnnnnnnnnnnnnnnnnnnnnnnnnnnnnnnnnnnnnnnnnnnnnnnnnnnnnnnnnnnnnnnnnnnnnnnnnnnnnnnnnnnnnnnnnnnnnnnnnnnnnnnnnnnnnnnnnnnnnnnnnnnnnnnnnnnnnnnnnnnnnnnnnnnnnnnnnnnnnnnnnnnnnnnnnnnnnnnnnnnnnnnnnnnnnnnnnnnnnnnnnnnnnnnnnnnnnnnnnnnnnnnnnnnnnnnnnnnnnnnnnnnnnnnnnnnnnnnnnnnnnnnnnnnnnnnnnnnnnnnnnnnnnnnnnnnnnnnnnnnnnnnnnnnnnnnnnnnnnnnnnnnnnnnnnnnnnnnnnnnnnnnnnnnnnnnnnnnnnnnnnnnnnnnnnnnnnnnnnnnnnnnnnnnnnnnnnnnnnnnnnnnnnnnnnnnnnnnnnnnnnnnnnnnnnnnnnnnnnnnnnnnnnnnnnnnnnnnnnnnnnnnnnnnnnnnnnnnnnnnnnnnnnnnnnnnnnnnnnnnnnnnnnnnnnnnnnnnnnnnnnnnnnnnnnnnnnnnnnnnnnnnnnnnnnnnnnnnnnnnnnnnnnnnnnnnnnnnnnnnnnnnnnnnnnnnnnnnnnnnnnnnnnnnnnnnnnnnnnnnnnnnnnnnnnnnnnnnnnnnnnnnnnnnnnnnnnnnnnnnnnnnnnnnnnnnnnnnnnnnnnnnnnnnnnnnnnnnnnnnnnnnnnnnnnnnnnnnnnnnnnnnnnnnnnnnnnnnnnnnnnnnnnnnnnnnnnnnnnnnnnnnnnnnnnnnnnnnnnnnnnnnnnnnnnnnnnnnnnnnnnnnnnnnnnnnnnnnnnnnnnnnnnnnnnnnnnnnnnnnnnnnnnnnnnnnnnnnnnnnnnnnnnnnnnnnnnnnnnnnnnnnnnnnnnnnnnnnnnnnnnnnnnnnnnnnnnnnnnnnnnnnnnnnnnnnnnnnnnnnnnnnnnnnnnnnnnnnnnnnnnnnnnnnnnnnnnnnnnnnnnnnnnnnnnnnnnnnnnnnnnnnnnnnnnnnnnnnnnnnnnnnnnnnnnnnnnnnnnnnnnnnnnnnnnnnnnnnnnnnnnnnnnnnnnnnnnnnnnnnnnnnnnnnnnnnnnnnnnnnnnnnnnnnnnnnnnnnnnnnnnnnnnnnnnnnnnnnnnnnnnnnnnnnnnnnnnnnnnnnnnnnnnnnnnnnnnnnnnnnnnnnnnnnnnnnnnnnnnnnnnnnnnnnnnnnnnnnnnnnnnnnnnnnnnnnnnnnnnnnnnnnnnnnnnnnnnnnnnnnnnnnnnnnnnnnnnnnnnnnnnnnnnnnnnnnnnnnnnnnnnnnnnnnnnnnnnnnnnnnnnnnnnnnnnnnnnnnnnnnnnnnnnnnnnnnnnnnnnnnnnnnnnnnnnnnnnnnnnnnnnnnnnnnnnnnnnnnnnnnnnnnnnnnnnnnnnnnnnnnnnnnnnnnnnnnnnnnnnnnnnnnnnnnnnnnnnnnnnnnnnnnnnnnnnnnnnnnnnnnnnnnnnnnnnnnnnnnnnnnnnnnnnnnnnnnnnnnnnnnnnnnnnnnnnnnnnnnnnnnnnnnnnnnnnnnnnnnnnnnnnnnnnnnnnnnnnnnnnnnnnnnnnnnnnnnnnnnnnnnnnnnnnnnnnnnnnnnnnnnnnnnnnnnnnnnnnnnnnnnnnnnnnnnnnnnnnnnnnnnnnnnnnnnnnnnnnnnnnnnnnnnnnnnnnnnnnnnnnnnnnnnnnnnnnnnnnnnnnnnnnnnnnnnnnnnnnnnnnnnnnnnnnnnnnnnnnnnnnnnnnnnnnnnnnnnnnnnnnnnnnnnnnnnnnnnnnnnnnnnnnnnnnnnnnnnnnnnnnnnnnnnnnnnnnnnnnnnnnnnnnnnnnnnnnnnnnnnnnnnnnnnnnnnnnnnnnnnnnnnnnnnnnnnnnnnnnnnnnnnnnnnnnnnnnnnnnnnnnnnnnnnnnnnnnnnnnnnnnnnnnnnnnnnnnnnnnnnnnnnnnnnnnnnnnnnnnnnnnnnnnnnnnnnnnnnnnnnnnnnnnnnnnnnnnnnnnnnnnnnnnnnnnnnnnnnnnnnnnnnnnnnnnnnnnnnnnnnnnnnnnnnnnnnnnnnnnnnnnnnnnnnnnnnnnnnnnnnnnnnnnnnnnnnnnnnnnnnnnnnnnnnnnnnnnnnnnnnnnnnnnnnnnnnnnnnnnnnnnnnnnnnnnnnnnnnnnnnnnnnnnnnnnnnnnnnnnnnnnnnnnnnnnnnnnnnnnnnnnnnnnnnnnnnnnnnnnnnnnnnnnnnnnnnnnnnnnnnnnnnnnnnnnnnnnnnnnnnnnnnnnnnnnnnnnnnnnnnnnnnnnnnnnnnnnnnnnnnnnnnnnnnnnnnnnnnnnnnnnnnnnnnnnnnnnnnnnnnnnnnnnnnnnnnnnnnnnnnnnnnnnnnnnnnnnnnnnnnnnnnnnnnnnnnnnnnnnnnnnnnnnnnnnnnnnnnnnnnnnnnnnnnnnnnnnnnnnnnnnnnnnnnnnnnnnnnnnnnnnnnnnnnnnnnnnnnnnnnnnnnnnnnnnnnnnnnnnnnnnnnnnnnnnnnnnnnnnnnnnnnnnnnnnnnnnnnnnnnnnnnnnnnnnnnnnnnnnnnnnnnnnnnnnnnnnnnnnnnnnnnnnnnnnnnnnnnnnnnnnnnnnnnnnnnnnnnnnnnnnnnnnnnnnnnnnnnnnnnnnnnnnnnnnnnnnnnnnnnnnnnnnnnnnnnnnnnnnnnnnnnnnnnnnnnnnnnnnnnnnnnnnnnnnnnnnnnnnnnnnnnnnnnnnnnnnnnnnnnnnnnnnnnnnnnnnnnnnnnnnnnnnnnnnnnnnnnnnnnnnnnnnnnnnnnnnnnnnnnnnnnnnnnnnnnnnnnnnnnnnnnnnnnnnnnnnnnnnnnnnnnnnnnnnnnnnnnnnnnnnnnnnnnnnnnnnnnnnnnnnnnnnnnnnnnnnnnnnnnnnnnnnnnnnnnnnnnnnnnnnnnnnnnnnnnnnnnnnnnnnnnnnnnnnnnnnnnnnnnnnnnnnnnnnnnnnnnnnnnnnnnnnnnnnnnnnnnnnnnnnnnnnnnnnnnnnnnnnnnnnnnnnnnnnnnnnnnnnnnnnnnnnnnnnnnnnnnnnnnnnnnnnnnnnnnnnnnnnnnnnnnnnnnnnnnnnnnnnnnnnnnnnnnnnnnnnnnnnnnnnnnnnnnnnnnnnnnnnnnnnnnnnnnnnnnnnnnnnnnnnnnnnnnnnnnnnnnnnnnnnnnnnnnnnnnnnnnnnnnnnnnnnnnnnnnnnnnnnnnnnnnnnnnnnnnnnnnnnnnnnnnnnnnnnnnnnnnnnnnnnnnnnnnnnnnnnnnnnnnnnnnnnnnnnnnnnnnnnnnnnnnnnnnnnnnnnnnnnnnnnnnnnnnnnnnnnnnnnnnnnnnnnnnnnnnnnnnnnnnnnnnnnnnnnnnnnnnnnnnnnnnnnnnnnnnnnnnnnnnnnnnnnnnnnnnnnnnnnnnnnnnnnnnnnnnnnnnnnnnnnnnnnnnnnnnnnnnnnnnnnnnnnnnnnnnnnnnnnnnnnnnnnnnnnnnnnnnnnnnnnnnnnnnnnnnnnnnnnnnnnnnnnnnnnnnnnnnnnnnnnnnnnnnnnnnnnnnnnnnnnnnnnnnnnnnnnnnnnnnnnnnnnnnnnnnnnnnnnnnnnnnnnnnnnnnnnnnnnnnnnnnnnnnnnnnnnnnnnnnnnnnnnnnnnnnnnnnnnnnnnnnnnnnnnnnnnnnnnnnnnnnnnnnnnnnnnnnnnnnnnnnnnnnnnnnnnnnnnnnnnnnnnnnnnnnnnnnnnnnnnnnnnnnnnnnnnnnnnnnnnnnnnnnnnnnnnnnnnnnnnnnnnnnnnnnnnnnnnnnnnnnnnnnnnnnnnnnnnnnnnnnnnnnnnnnnnnnnnnnnnnnnnnnnnnnnnnnnnnnnnnnnnnnnnnnnnnnnnnnnnnnnnnnnnnnnnnnnnnnnnnnnnnnnnnnnnnnnnnnnnnnnnnnnnnnnnnnnnnnnnnnnnnnnnnnnnnnnnnnnnnnnnnnnnnnnnnnnnnnnnnnnnnnnnnnnnnnnnnnnnnnnnnnnnnnnnnnnnnnnnnnnnnnnnnnnnnnnnnnnnnnnnnnnnnnnnnnnnnnnnnnnnnnnnnnnnnnnnnnnnnnnnnnnnnnnnnnnnnnnnnnnnnnnnnnnnnnnnnnnnnnnnnnnnnnnnnnnnnnnnnnnnnnnnnnnnnnnnnnnnnnnnnnnnnnnnnnnnnnnnnnnnnnnnnnnnnnnnnnnnnnnnnnnnnnnnnnnnnnnnnnnnnnnnnnnnnnnnnnnnnnnnnnnnnnnnnnnnnnnnnnnnnnnnnnnnnnnnnnnnnnnnnnnnnnnnnnnnnnnnnnnnnnnnnnnnnnnnnnnnnnnnnnnnnnnnnnnnnnnnnnnnnnnnnnnnnnnnnnnnnnnnnnnnnnnnnnnnnnnnnnnnnnnnnnnnnnnnnnnnnnnnnnnnnnnnnnnnnnnnnnnnnnnnnnnnnnnnnnnnnnnnnnnnnnnnnnnnnnnnnnnnnnnnnnnnnnnnnnnnnnnnnnnnnnnnnnnnnnnnnnnnnnnnnnnnnnnnnnnnnnnnnnnnnnnnnnnnnnnnnnnnnnnnnnnnnnnnnnnnnnnnnnnnnnnnnnnnnnnnnnnnnnnnnnnnnnnnnnnnnnnnnnnnnnnnnnnnnnnnnnnnnnnnnnnnnnnnnnnnnnnnnnnnnnnnnnnnnnnnnnnnnnnnnnnnnnnnnnnnnnnnnnnnnnnnnnnnnnnnnnnnnnnnnnnnnnnnnnnnnnnnnnnnnnnnnnnnnnnnnnnnnnnnnnnnnnnnnnnnnnnnnnnnnnnnnnnnnnnnnnnnnnnnnnnnnnnnnnnnnnnnnnnnnnnnnnnnnnnnnnnnnnnnnnnnnnnnnnnnnnnnnnnnnnnnnnnnnnnnnnnnnnnnnnnnnnnnnnnnnnnnnnnnnnnnnnnnnnnnnnnnnnnnnnnnnnnnnnnnnnnnnnnnnnnnnnnnnnnnnnnnnnnnnnnnnnnnnnnnnnnnnnnnnnnnnnnnnnnnnnnnnnnnnnnnnnnnnnnnnnnnnnnnnnnnnnnnnnnnnnnnnnnnnnnnnnnnnnnnnnnnnnnnnnnnnnnnnnnnnnnnnnnnnnnnnnnnnnnnnnnnnnnnnnnnnnnnnnnnnnnnnnnnnnnnnnnnnnnnnnnnnnnnnnnnnnnnnnnnnnnnnnnnnnnnnnnnnnnnnnnnnnnnnnnnnnnnnnnnnnnnnnnnnnnnnnnnnnnnnnnnnnnnnnnnnnnnnnnnnnnnnnnnnnnnnnnnnnnnnnnnnnnnnnnnnnnnnnnnnnnnnnnnnnnnnnnnnnnnnnnnnnnnnnnnnnnnnnnnnnnnnnnnnnnnnnnnnnnnnnnnnnnnnnnnnnnnnnnnnnnnnnnnnnnnnnnnnnnnnnnnnnnnnnnnnnnnnnnnnnnnnnnnnnnnnnnnnnnnnnnnnnnnnnnnnnnnnnnnnnnnnnnnnnnnnnnnnnnnnnnnnnnnnnnnnnnnnnnnnnnnnnnnnnnnnnnnnnnnnnnnnnnnnnnnnnnnnnnnnnnnnnnnnnnnnnnnnnnnnnnnnnnnnnnnnnnnnnnnnnnnnnnnnnnnnnnnnnnnnnnnnnnnnnnnnnnnnnnnnnnnnnnnnnnnnnnnnnnnnnnnnnnnnnnnnnnnnnnnnnnnnnnnnnnnnnnnnnnnnnnnnnnnnnnnnnnnnnnnnnnnnnnnnnnnnnnnnnnnnnnnnnnnnnnnnnnnnnnnnnnnnnnnnnnnnnnnnnnnnnnnnnnnnnnnnnnnnnnnnnnnnnnnnnnnnnnnnnnnnnnnnnnnnnnnnnnnnnnnnnnnnnnnnnnnnnnnnnnnnnnnnnnnnnnnnnnnnnnnnnnnnnnnnnnnnnnnnnnnnnnnnnnnnnnnnnnnnnnnnnnnnnnnnnnnnnnnnnnnnnnnnnnnnnnnnnnnnnnnnnnnnnnnnnnnnnnnnnnnnnnnnnnnnnnnnnnnnnnnnnnnnnnnnnnnnnnnnnnnnnnnnnnnnnnnnnnnnnnnnnnnnnnnnnnnnnnnnnnnnnnnnnnnnnnnnnnnnnnnnnnnnnnnnnnnnnnnnnnnnnnnnnnnnnnnnnnnnnnnnnnnnnnnnnnnnnnnnnnnnnnnnnnnnnnnnnnnnnnnnnnnnnnnnnnnnnnnnnnnnnnnnnnnnnnnnnnnnnnnnnnnnnnnnnnnnnnnnnnnnnnnnnnnnnnnnnnnnnnnnnnnnnnnnnnnnnnnnnnnnnnnnnnnnnnnnnnnnnnnnnnnnnnnnnnnnnnnnnnnnnnnnnnnnnnnnnnnnnnnnnnnnnnnnnnnnnnnnnnnnnnnnnnnnnnnnnnnnnnnnnnnnnnnnnnnnnnnnnnnnnnnnnnnnnnnnnnnnnnnnnnnnnnnnnnnnnnnnnnnnnnnnnnnnnnnnnnnnnnnnnnnnnnnnnnnnnnnnnnnnnnnnnnnnnnnnnnnnnnnnnnnnnnnnnnnnnnnnnnnnnnnnnnnnnnnnnnnnnnnnnnnnnnnnnnnnnnnnnnnnnnnnnnnnnnnnnnnnnnnnnnnnnnnnnnnnnnnnnnnnnnnnnnnnnnnnnnnnnnnnnnnnnnnnnnnnnnnnnnnnnnnnnnnnnnnnnnnnnnnnnnnnnnnnnnnnnnnnnnnnnnnnnnnnnnnnnnnnnnnnnnnnnnnnnnnnnnnnnnnnnnnnnnnnnnnnnnnnnnnnnnnnnnnnnnnnnnnnnnnnnnnnnnnnnnnnnnnnnnnnnnnnnnnnnnnnnnnnnnnnnnnnnnnnnnnnnnnnnnnnnnnnnnnnnnnnnnnnnnnnnnnnnnnnnnnnnnnnnnnnnnnnnnnnnnnnnnnnnnnnnnnnnnnnnnnnnnnnnnnnnnnnnnnnnnnnnnnnnnnnnnnnnnnnnnnnnnnnnnnnnnnnnnnnnnnnnnnnnnnnnnnnnnnnnnnnnnnnnnnnnnnnnnnnnnnnnnnnnnnnnnnnnnnnnnnnnnnnnnnnnnnnnnnnnnnnnnnnnnnnnnnnnnnnnnnnnnnnnnnnnnnnnnnnnnnnnnnnnnnnnnnnnnnnnnnnnnnnnnnnnnnnnnnnnnnnnnnnnnnnnnnnnnnnnnnnnnnnnnnnnnnnnnnnnnnnnnnnnnnnnnnnnnnnnnnnnnnnnnnnnnnnnnnnnnnnnnnnnnnnnnnnnnnnnnnnnnnnnnnnnnnnnnnnnnnnnnnnnnnnnnnnnnnnnnnnnnnnnnnnnnnnnnnnnnnnnnnnnnnnnnnnnnnnnnnnnnnnnnnnnnnnnnnnnnnnnnnnnnnnnnnnnnnnnnnnnnnnnnnnnnnnnnnnnnnnnnnnnnnnnnnnnnnnnnnnnnnnnnnnnnnnnnnnnnnnnnnnnnnnnnnnnnnnnnnnnnnnnnnnnnnnnnnnnnnnnnnnnnnnnnnnnnnnnnnnnnnnnnnnnnnnnnnnnnnnnnnnnnnnnnnnnnnnnnnnnnnnnnnnnnnnnnnnnnnnnnnnnnnnnnnnnnnnnnnnnnnnnnnnnnnnnnnnnnnnnnnnnnnnnnnnnnnnnnnnnnnnnnnnnnnnnnnnnnnnnnnnnnnnnnnnnnnnnnnnnnnnnnnnnnnnnnnnnnnnnnnnnnnnnnnnnnnnnnnnnnnnnnnnnnnnnnnnnnnnnnnnnnnnnnnnnnnnnnnnnnnnnnnnnnnnnnnnnnnnnnnnnnnnnnnnnnnnnnnnnnnnnnnnnnnnnnnnnnnnnnnnnnnnnnnnnnnnnnnnnnnnnnnnnnnnnnnnnnnnnnnnnnnnnnnnnnnnnnnnnnnnnnnnnnnnnnnnnnnnnnnnnnnnnnnnnnnnnnnnnnnnnnnnnnnnnnnnnnnnnnnnnnnnnnnnnnnnnnnnnnnnnnnnnnnnnnnnnnnnnnnnnnnnnnnnnnnnnnnnnnnnnnnnnnnnnnnnnnnnnnnnnnnnnnnnnnnnnnnnnnnnnnnnnnnnnnnnnnnnnnnnnnnnnnnnnnnnnnnnnnnnnnnnnnnnnnnnnnnnnnnnnnnnnnnnnnnnnnnnnnnnnnnnnnnnnnnnnnnnnnnnnnnnnnnnnnnnnnnnnnnnnnnnnnnnnnnnnnnnnnnnnnnnnnnnnnnnnnnnnnnnnnnnnnnnnnnnnnnnnnnnnnnnnnnnnnnnnnnnnnnnnnnnnnnnnnnnnnnnnnnnnnnnnnnnnnnnnnnnnnnnnnnnnnnnnnnnnnnnnnnnnnnnnnnnnnnnnnnnnnnnnnnnnnnnnnnnnnnnnnnnnnnnnnnnnnnnnnnnnnnnnnnnnnnnnnnnnnnnnnnnnnnnnnnnnnnnnnnnnnnnnnnnnnnnnnnnnnnnnnnnnnnnnnnnnnnnnnnnnnnnnnnnnnnnnnnnnnnnnnnnnnnnnnnnnnnnnnnnnnnnnnnnnnnnnnnnnnnnnnnnnnnnnnnnnnnnnnnnnnnnnnnnnnnnnnnnnnnnnnnnnnnnnnnnnnnnnnnnnnnnnnnnnnnnnnnnnnnnnnnnnnnnnnnnnnnnnnnnnnnnnnnnnnnnnnnnnnnnnnnnnnnnnnnnnnnnnnnnnnnnnnnnnnnnnnnnnnnnnnnnnnnnnnnnnnnnnnnnnnnnnnnnnnnnnnnnnnnnnnnnnnnnnnnnnnnnnnnnnnnnnnnnnnnnnnnnnnnnnnnnnnnnnnnnnnnnnnnnnnnnnnnnnnnnnnnnnnnnnnnnnnnnnnnnnnnnnnnnnnnnnnnnnnnnnnnnnnnnnnnnnnnnnnnnnnnnnnnnnnnnnnnnnnnnnnnnnnnnnnnnnnnnnnnnnnnnnnnnnnnnnnnnnnnnnnnnnnnnnnnnnnnnnnnnnnnnnnnnnnnnnnnnnnnnnnnnnnnnnnnnnnnnnnnnnnnnnnnnnnnnnnnnnnnnnnnnnnnnnnnnnnnnnnnnnnnnnnnnnnnnnnnnnnnnnnnnnnnnnnnnnnnnnnnnnnnnnnnnnnnnnnnnnnnnnnnnnnnnnnnnnnnnnnnnnnnnnnnnnnnnnnnnnnnnnnnnnnnnnnnnnnnnnnnnnnnnnnnnnnnnnnnnnnnnnnnnnnnnnnnnnnnnnnnnnnnnnnnnnnnnnnnnnnnnnnnnnnnnnnnnnnnnnnnnnnnnnnnnnnnnnnnnnnnnnnnnnnnnnnnnnnnnnnnnnnnnnnnnnnnnnnnnnnnnnnnnnnnnnnnnnnnnnnnnnnnnnnnnnnnnnnnnnnnnnnnnnnnnnnnnnnnnnnnnnnnnnnnnnnnnnnnnnnnnnnnnnnnnnnnnnnnnnnnnnnnnnnnnnnnnnnnnnnnnnnnnnnnnnnnnnnnnnnnnnnnnnnnnnnnnnnnnnnnnnnnnnnnnnnnnnnnnnnnnnnnnnnnnnnnnnnnnnnnnnnnnnnnnnnnnnnnnnnnnnnnnnnnnnnnnnnnnnnnnnnnnnnnnnnnnnnnnnnnnnnnnnnnnnnnnnnnnnnnnnnnnnnnnnnnnnnnnnnnnnnnnnnnnnnnnnnnnnnnnnnnnnnnnnnnnnnnnnnnnnnnnnnnnnnnnnnnnnnnnnnnnnnnnnnnnnnnnnnnnnnnnnnnnnnnnnnnnnnnnnnnnnnnnnnnnnnnnnnnnnnnnnnnnnnnnnnnnnnnnnnnnnnnnnnnnnnnnnnnnnnnnnnnnnnnnnnnnnnnnnnnnnnnnnnnnnnnnnnnnnnnnnnnnnnnnnnnnnnnnnnnnnnnnnnnnnnnnnnnnnnnnnnnnnnnnnnnnnnnnnnnnnnnnnnnnnnnnnnnnnnnnnnnnnnnnnnnnnnnnnnnnnnnnnnnnnnnnnnnnnnnnnnnnnnnnnnnnnnnnnnnnnnnnnnnnnnnnnnnnnnnnnnnnnnnnnnnnnnnnnnnnnnnnnnnnnnnnnnnnnnnnnnnnnnnnnnnnnnnnnnnnnnnnnnnnnnnnnnnnnnnnnnnnnnnnnnnnnnnnnnnnnnnnnnnnnnnnnnnnnnnnnnnnnnnnnnnnnnnnnnnnnnnnnnnnnnnnnnnnnnnnnnnnnnnnnnnnnnnnnnnnnnnnnnnnnnnnnnnnnnnnnnnnnnnnnnnnnnnnnnnnnnnnnnnnnnnnnnnnnnnnnnnnnnnnnnnnnnnnnnnnnnnnnnnnnnnnnnnnnnnnnnnnnnnnnnnnnnnnnnnnnnnnnnnnnnnnnnnnnnnnnnnnnnnnnnnnnnnnnnnnnnnnnnnnnnnnnnnnnnnnnnnnnnnnnnnnnnnnnnnnnnnnnnnnnnnnnnnnnnnnnnnnnnnnnnnnnnnnnnnnnnnnnnnnnnnnnnnnnnnnnnnnnnnnnnnnnnnnnnnnnnnnnnnnnnnnnnnnnnnnnnnnnnnnnnnnnnnnnnnnnnnnnnnnnnnnnnnnnnnnnnnnnnnnnnnnnnnnnnnnnnnnnnnnnnnnnnnnnnnnnnnnnnnnnnnnnnnnnnnnnnnnnnnnnnnnnnnnnnnnnnnnnnnnnnnnnnnnnnnnnnnnnnnnnnnnnnnnnnnnnnnnnnnnnnnnnnnnnnnnnnnnnnnnnnnnnnnnnnnnnnnnnnnnnnnnnnnnnnnnnnnnnnnnnnnnnnnnnnnnnnnnnnnnnnnnnnnnnnnnnnnnnnnnnnnnnnnnnnnnnnnnnnnnnnnnnnnnnnnnnnnnnnnnnnnnnnnnnnnnnnnnnnnnnnnnnnnnnnnnnnnnnnnnnnnnnnnnnnnnnnnnnnnnnnnnnnnnnnnnnnnnnnnnnnnnnnnnnnnnnnnnnnnnnnnnnnnnnnnnnnnnnnnnnnnnnnnnnnnnnnnnnnnnnnnnnnnnnnnnnnnnnnnnnnnnnnnnnnnnnnnnnnnnnnnnnnnnnnnnnnnnnnnnnnnnnnnnnnnnnnnnnnnnnnnnnnnnnnnnnnnnnnnnnnnnnnnnnnnnnnnnnnnnnnnnnnnnnnnnnnnnnnnnnnnnnnnnnnnnnnnnnnnnnnnnnnnnnnnnnnnnnnnnnnnnnnnnnnnnnnnnnnnnnnnnnnnnnnnnnnnnnnnnnnnnnnnnnnnnnnnnnnnnnnnnnnnnnnnnnnnnnnnnnnnnnnnnnnnnnnnnnnnnnnnnnnnnnnnnnnnnnnnnnnnnnnnnnnnnnnnnnnnnnnnnnnnnnnnnnnnnnnnnnnnnnnnnnnnnnnnnnnnnnnnnnnnnnnnnnnnnnnnnnnnnnnnnnnnnnnnnnnnnnnnnnnnnnnnnnnnnnnnnnnnnnnnnnnnnnnnnnnnnnnnnnnnnnnnnnnnnnnnnnnnnnnnnnnnnnnnnnnnnnnnnnnnnnnnnnnnnnnnnnnnnnnnnnnnnnnnnnnnnnnnnnnnnnnnnnnnnnnnnnnnnnnnnnnnnnnnnnnnnnnnnnnnnnnnnnnnnnnnnnnnnnnnnnnnnnnnnnnnnnnnnnnnnnnnnnnnnnnnnnnnnnnnnnnnnnnnnnnnnnnnnnnnnnnnnnnnnnnnnnnnnnnnnnnnnnnnnnnnnnnnnnnnnnnnnnnnnnnnnnnnnnnnnnnnnnnnnnnnnnnnnnnnnnnnnnnnnnnnnnnnnnnnnnnnnnnnnnnnnnnnnnnnnnnnnnnnnnnnnnnnnnnnnnnnnnnnnnnnnnnnnnnnnnnnnnnnnnnnnnnnnnnnnnnnnnnnnnnnnnnnnnnnnnnnnnnnnnnnnnnnnnnnnnnnnnnnnnnnnnnnnnnnnnnnnnnnnnnnnnnnnnnnnnnnnnnnnnnnnnnnnnnnnnnnnnnnnnnnnnnnnnnnnnnnnnnnnnnnnnnnnnnnnnnnnnnnnnnnnnnnnnnnnnnnnnnnnnnnnnnnnnnnnnnnnnnnnnnnnnnnnnnnnnnnnnnnnnnnnnnnnnnnnnnnnnnnnnnnnnnnnnnnnnnnnnnnnnnnnnnnnnnnnnnnnnnnnnnnnnnnnnnnnnnnnnnnnnnnnnnnnnnnnnnnnnnnnnnnnnnnnnnnnnnnnnnnnnnnnnnnnnnnnnnnnnnnnnnnnnnnnnnnnnnnnnnnnnnnnnnnnnnnnnnnnnnnnnnnnnnnnnnnnnnnnnnnnnnnnnnnnnnnnnnnnnnnnnnnnnnnnnnnnnnnnnnnnnnnnnnnnnnnnnnnnnnnnnnnnnnnnnnnnnnnnnnnnnnnnnnnnnnnnnnnnnnnnnnnnnnnnnnnnnnnnnnnnnnnnnnnnnnnnnnnnnnnnnnnnnnnnnnnnnnnnnnnnnnnnnnnnnnnnnnnnnnnnnnnnnnnnnnnnnnnnnnnnnnnnnnnnnnnnnnnnnnnnnnnnnnnnnnnnnnnnnnnnnnnnnnnnnnnnnnnnnnnnnnnnnnnnnnnnnnnnnnnnnnnnnnnnnnnnnnnnnnnnnnnnnnnnnnnnnnnnnnnnnnnnnnnnnnnnnnnnnnnnnnnnnnnnnnnnnnnnnnnnnnnnnnnnnnnnnnnnnnnnnnnnnnnnnnnnnnnnnnnnnnnnnnnnnnnnnnnnnnnnnnnnnnnnnnnnnnnnnnnnnnnnnnnnnnnnnnnnnnnnnnnnnnnnnnnnnnnnnnnnnnnnnnnnnnnnnnnnnnnnnnnnnnnnnnnnnnnnnnnnnnnnnnnnnnnnnnnnnnnnnnnnnnnnnnnnnnnnnnnnnnnnnnnnnnnnnnnnnnnnnnnnnnnnnnnnnnnnnnnnnnnnnnnnnnnnnnnnnnnnnnnnnnnnnnnnnnnnnnnnnnnnnnnnnnnnnnnnnnnnnnnnnnnnnnnnnnnnnnnnnnnnnnnnnnnnnnnnnnnnnnnnnnnnnnnnnnnnnnnnnnnnnnnnnnnnnnnnnnnnnnnnnnnnnnnnnnnnnnnnnnnnnnnnnnnnnnnnnnnnnnnnnnnnnnnnnnnnnnnnnnnnnnnnnnnnnnnnnnnnnnnnnnnnnnnnnnnnnnnnnnnnnnnnnnnnnnnnnnnnnnnnnnnnnnnnnnnnnnnnnnnnnnnnnnnnnnnnnnnnnnnnnnnnnnnnnnnnnnnnnnnnnnnnnnnnnnnnnnnnnnnnnnnnnnnnnnnnnnnnnnnnnnnnnnnnnnnnnnnnnnnnnnnnnnnnnnnnnnnnnnnnnnnnnnnnnnnnnnnnnnnnnnnnnnnnnnnnnnnnnnnnnnnnnnnnnnnnnnnnnnnnnnnnnnnnnnnnnnnnnnnnnnnnnnnnnnnnnnnnnnnnnnnnnnnnnnnnnnnnnnnnnnnnnnnnnnnnnnnnnnnnnnnnnnnnnnnnnnnnnnnnnnnnnnnnnnnnnnnnnnnnnnnnnnnnnnnnnnnnnnnnnnnnnnnnnnnnnnnnnnnnnnnnnnnnnnnnnnnnnnnnnnnnnnnnnnnnnnnnnnnnnnnnnnnnnnnnnnnnnnnnnnnnnnnnnnnnnnnnnnnnnnnnnnnnnnnnnnnnnnnnnnnnnnnnnnnnnnnnnnnnnnnnnnnnnnnnnnnnnnnnnnnnnnnnnnnnnnnnnnnnnnnnnnnnnnnnnnnnnnnnnnnnnnnnnnnnnnnnnnnnnnnnnnnnnnnnnnnnnnnnnnnnnnnnnnnnnnnnnnnnnnnnnnnnnnnnnnnnnnnnnnnnnnnnnnnnnnnnnnnnnnnnnnnnnnnnnnnnnnnnnnnnnnnnnnnnnnnnnnnnnnnnnnnnnnnnnnnnnnnnnnnnnnnnnnnnnnnnnnnnnnnnnnnnnnnnnnnnnnnnnnnnnnnnnnnnnnnnnnnnnnnnnnnnnnnnnnnnnnnnnnnnnnnnnnnnnnnnnnnnnnnnnnnnnnnnnnnnnnnnnnnnnnnnnnnnnnnnnnnnnnnnnnnnnnnnnnnnnnnnnnnnnnnnnnnnnnnnnnnnnnnnnnnnnnnnnnnnnnnnnnnnnnnnnnnnnnnnnnnnnnnnnnnnnnnnnnnnnnnnnnnnnnnnnnnnnnnnnnnnnnnnnnnnnnnnnnnnnnnnnnnnnnnnnnnnnnnnnnnnnnnnnnnnnnnnnnnnnnnnnnnnnnnnnnnnnnnnnnnnnnnnnnnnnnnnnnnnnnnnnnnnnnnnnnnnnnnnnnnnnnnnnnnnnnnnnnnnnnnnnnnnnnnnnnnnnnnnnnnnnnnnnnnnnnnnnnnnnnnnnnnnnnnnnnnnnnnnnnnnnnnnnnnnnnnnnnnnnnnnnnnnnnnnnnnnnnnnnnnnnnnnnnnnnnnnnnnnnnnnnnnnnnnnnnnnnnnnnnnnnnnnnnnnnnnnnnnnnnnnnnnnnnnnnnnnnnnnnnnnnnnnnnnnnnnnnnnnnnnnnnnnnnnnnnnnnnnnnnnnnnnnnnnnnnnnnnnnnnnnnnnnnnnnnnnnnnnnnnnnnnnnnnnnnnnnnnnnnnnnnnnnnnnnnnnnnnnnnnnnnnnnnnnnnnnnnnnnnnnnnnnnnnnnnnnnnnnnnnnnnnnnnnnnnnnnnnnnnnnnnnnnnnnnnnnnnnnnnnnnnnnnnnnnnnnnnnnnnnnnnnnnnnnnnnnnnnnnnnnnnnnnnnnnnnnnnnnnnnnnnnnnnnnnnnnnnnnnnnnnnnnnnnnnnnnnnnnnnnnnnnnnnnnnnnnnnnnnnnnnnnnnnnnnnnnnnnnnnnnnnnnnnnnnnnnnnnnnnnnnnnnnnnnnnnnnnnnnnnnnnnnnnnnnnnnnnnnnnnnnnnnnnnnnnnnnnnnnnnnnnnnnnnnnnnnnnnnnnnnnnnnnnnnnnnnnnnnnnnnnnnnnnnnnnnnnnnnnnnnnnnnnnnnnnnnnnnnnnnnnnnnnnnnnnnnnnnnnnnnnnnnnnnnnnnnnnnnnnnnnnnnnnnnnnnnnnnnnnnnnnnnnnnnnnnnnnnnnnnnnnnnnnnnnnnnnnnnnnnnnnnnnnnnnnnnnnnnnnnnnnnnnnnnnnnnnnnnnnnnnnnnnnnnnnnnnnnnnnnnnnnnnnnnnnnnnnnnnnnnnnnnnnnnnnnnnnnnnnnnnnnnnnnnnnnnnnnnnnnnnnnnnnnnnnnnnnnnnnnnnnnnnnnnnnnnnnnnnnnnnnnnnnnnnnnnnnnnnnnnnnnnnnnnnnnnnnnnnnnnnnnnnnnnnnnnnnnnnnnnnnnnnnnnnnnnnnnnnnnnnnnnnnnnnnnnnnnnnnnnnnnnnnnnnnnnnnnnnnnnnnnnnnnnnnnnnnnnnnnnnnnnnnnnnnnnnnnnnnnnnnnnnnnnnnnnnnnnnnnnnnnnnnnnnnnnnnnnnnnnnnnnnnnnnnnnnnnnnnnnnnnnnnnnnnnnnnnnnnnnnnnnnnnnnnnnnnnnnnnnnnnnnnnnnnnnnnnnnnnnnnnnnnnnnnnnnnnnnnnnnnnnnnnnnnnnnnnnnnnnnnnnnnnnnnnnnnnnnnnnnnnnnnnnnnnnnnnnnnnnnnnnnnnnnnnnnnnnnnnnnnnnnnnnnnnnnnnnnnnnnnnnnnnnnnnnnnnnnnnnnnnnnnnnnnnnnnnnnnnnnnnnnnnnnnnnnnnnnnnnnnnnnnnnnnnnnnnnnnnnnnnnnnnnnnnnnnnnnnnnnnnnnnnnnnnnnnnnnnnnnnnnnnnnnnnnnnnnnnnnnnnnnnnnnnnnnnnnnnnnnnnnnnnnnnnnnnnnnnnnnnnnnnnnnnnnnnnnnnnnnnnnnnnnnnnnnnnnnnnnnnnnnnnnnnnnnnnnnnnnnnnnnnnnnnnnnnnnnnnnnnnnnnnnnnnnnnnnnnnnnnnnnnnnnnnnnnnnnnnnnnnnnnnnnnnnnnnnnnnnnnnnnnnnnnnnnnnnnnnnnnnnnnnnnnnnnnnnnnnnnnnnnnnnnnnnnnnnnnnnnnnnnnnnnnnnnnnnnnnnnnnnnnnnnnnnnnnnnnnnnnnnnnnnnnnnnnnnnnnnnnnnnnnnnnnnnnnnnnnnnnnnnnnnnnnnnnnnnnnnnnnnnnnnnnnnnnnnnnnnnnnnnnnnnnnnnnnnnnnnnnnnnnnnnnnnnnnnnnnnnnnnnnnnnnnnnnnnnnnnnnnnnnnnnnnnnnnnnnnnnnnnnnnnnnnnnnnnnnnnnnnnnnnnnnnnnnnnnnnnnnnnnnnnnnnnnnnnnnnnnnnnnnnnnnnnnnnnnnnnnnnnnnnnnnnnnnnnnnnnnnnnnnnnnnnnnnnnnnnnnnnnnnnnnnnnnnnnnnnnnnnnnnnnnnnnnnnnnnnnnnnnnnnnnnnnnnnnnnnnnnnnnnnnnnnnnnnnnnnnnnnnnnnnnnnnnnnnnnnnnnnnnnnnnnnnnnnnnnnnnnnnnnnnnnnnnnnnnnnnnnnnnnnnnnnnnnnnnnnnnnnnnnnnnnnnnnnnnnnnnnnnnnnnnnnnnnnnnnnnnnnnnnnnnnnnnnnnnnnnnnnnnnnnnnnnnnnnnnnnnnnnnnnnnnnnnnnnnnnnnnnnnnnnnnnnnnnnnnnnnnnnnnnnnnnnnnnnnnnnnnnnnnnnnnnnnnnnnnnnnnnnnnnnnnnnnnnnnnnnnnnnnnnnnnnnnnnnnnnnnnnnnnnnnnnnnnnnnnnnnnnnnnnnnnnnnnnnnnnnnnnnnnnnnnnnnnnnnnnnnnnnnnnnnnnnnnnnnnnnnnnnnnnnnnnnnnnnnnnnnnnnnnnnnnnnnnnnnnnnnnnnnnnnnnnnnnnnnnnnnnnnnnnnnnnnnnnnnnnnnnnnnnnnnnnnnnnnnnnnnnnnnnnnnnnnnnnnnnnnnnnnnnnnnnnnnnnnnnnnnnnnnnnnnnnnnnnnnnnnnnnnnnnnnnnnnnnnnnnnnnnnnnnnnnnnnnnnnnnnnnnnnnnnnnnnnnnnnnnnnnnnnnnnnnnnnnnnnnnnnnnnnnnnnnnnnnnnnnnnnnnnnnnnnnnnnnnnnnnnnnnnnnnnnnnnnnnnnnnnnnnnnnnnnnnnnnnnnnnnnnnnnnnnnnnnnnnnnnnnnnnnnnnnnnnnnnnnnnnnnnnnnnnnnnnnnnnnnnnnnnnnnnnnnnnnnnnnnnnnnnnnnnnnnnnnnnnnnnnnnnnnnnnnnnnnnnnnnnnnnnnnnnnnnnnnnnnnnnnnnnnnnnnnnnnnnnnnnnnnnnnnnnnnnnnnnnnnnnnnnnnnnnnnnnnnnnnnnnnnnnnnnnnnnnnnnnnnnnnnnnnnnnnnnnnnnnnnnnnnnnnnnnnnnnnnnnnnnnnnnnnnnnnnnnnnnnnnnnnnnnnnnnnnnnnnnnnnnnnnnnnnnnnnnnnnnnnnnnnnnnnnnnnnnnnnnnnnnnnnnnnnnnnnnnnnnnnnnnnnnnnnnnnnnnnnnnnnnnnnnnnnnnnnnnnnnnnnnnnnnnnnnnnnnnnnnnnnnnnnnnnnnnnnnnnnnnnnnnnnnnnnnnnnnnnnnnnnnnnnnnnnnnnnnnnnnnnnnnnnnnnnnnnnnnnnnnnnnnnnnnnnnnnnnnnnnnnnnnnnnnnnnnnnnnnnnnnnnnnnnnnnnnnnnnnnnnnnnnnnnnnnnnnnnnnnnnnnnnnnnnnnnnnnnnnnnnnnnnnnnnnnnnnnnnnnnnnnnnnnnnnnnnnnnnnnnnnnnnnnnnnnnnnnnnnnnnnnnnnnnnnnnnnnnnnnnnnnnnnnnnnnnnnnnnnnnnnnnnnnnnnnnnnnnnnnnnnnnnnnnnnnnnnnnnnnnnnnnnnnnnnnnnnnnnnnnnnnnnnnnnnnnnnnnnnnnnnnnnnnnnnnnnnnnnnnnnnnnnnnnnnnnnnnnnnnnnnnnnnnnnnnnnnnnnnnnnnnnnnnnnnnnnnnnnnnnnnnnnnnnnnnnnnnnnnnnnnnnnnnnnnnnnnnnnnnnnnnnnnnnnnnnnnnnnnnnnnnnnnnnnnnnnnnnnnnnnnnnnnnnnnnnnnnnnnnnnnnnnnnnnnnnnnnnnnnnnnnnnnnnnnnnnnnnnnnnnnnnnnnnnnnnnnnnnnnnnnnnnnnnnnnnnnnnnnnnnnnnnnnnnnnnnnnnnnnnnnnnnnnnnnnnnnnnnnnnnnnnnnnnnnnnnnnnnnnnnnnnnnnnnnnnnnnnnnnnnnnnnnnnnnnnnnnnnnnnnnnnnnnnnnnnnnnnnnnnnnnnnnnnnnnnnnnnnnnnnnnnnnnnnnnnnnnnnnnnnnnnnnnnnnnnnnnnnnnnnnnnnnnnnnnnnnnnnnnnnnnnnnnnnnnnnnnnnnnnnnnnnnnnnnnnnnnnnnnnnnnnnnnnnnnnnnnnnnnnnnnnnnnnnnnnnnnnnnnnnnnnnnnnnnnnnnnnnnnnnnnnnnnnnnnnnnnnnnnnnnnnnnnnnnnnnnnnnnnnnnnnnnnnnnnnnnnnnnnnnnnnnnnnnnnnnnnnnnnnnnnnnnnnnnnnnnnnnnnnnnnnnnnnnnnnnnnnnnnnnnnnnnnnnnnnnnnnnnnnnnnnnnnnnnnnnnnnnnnnnnnnnnnnnnnnnnnnnnnnnnnnnnnnnnnnnnnnnnnnnnnnnnnnnnnnnnnnnnnnnnnnnnnnnnnnnnnnnnnnnnnnnnnnnnnnnnnnnnnnnnnnnnnnnnnnnnnnnnnnnnnnnnnnnnnnnnnnnnnnnnnnnnnnnnnnnnnnnnnnnnnnnnnnnnnnnnnnnnnnnnnnnnnnnnnnnnnnnnnnnnnnnnnnnnnnnnnnnnnnnnnnnnnnnnnnnnnnnnnnnnnnnnnnnnnnnnnnnnnnnnnnnnnnnnnnnnnnnnnnnnnnnnnnnnnnnnnnnnnnnnnnnnnnnnnnnnnnnnnnnnnnnnnnnnnnnnnnnnnnnnnnnnnnnnnnnnnnnnnnnnnnnnnnnnnnnnnnnnnnnnnnnnnnnnnnnnnnnnnnnnnnnnnnnnnnnnnnnnnnnnnnnnnnnnnnnnnnnnnnnnnnnnnnnnnnnnnnnnnnnnnnnnnnnnnnnnnnnnnnnnnnnnnnnnnnnnnnnnnnnnnnnnnnnnnnnnnnnnnnnnnnnnnnnnnnnnnnnnnnnnnnnnnnnnnnnnnnnnnnnnnnnnnnnnnnnnnnnnnnnnnnnnnnnnnnnnnnnnnnnnnnnnnnnnnnnnnnnnnnnnnnnnnnnnnnnnnnnnnnnnnnnnnnnnnnnnnnnnnnnnnnnnnnnnnnnnnnnnnnnnnnnnnnnnnnnnnnnnnnnnnnnnnnnnnnnnnnnnnnnnnnnnnnnnnnnnnnnnnnnnnnnnnnnnnnnnnnnnnnnnnnnnnnnnnnnnnnnnnnnnnnnnnnnnnnnnnnnnnnnnnnnnnnnnnnnnnnnnnnnnnnnnnnnnnnnnnnnnnnnnnnnnnnnnnnnnnnnnnnnnnnnnnnnnnnnnnnnnnnnnnnnnnnnnnnnnnnnnnnnnnnnnnnnnnnnnnnnnnnnnnnnnnnnnnnnnnnnnnnnnnnnnnnnnnnnnnnnnnnnnnnnnnnnnnnnnnnnnnnnnnnnnnnnnnnnnnnnnnnnnnnnnnnnnnnnnnnnnnnnnnnnnnnnnnnnnnnnnnnnnnnnnnnnnnnnnnnnnnnnnnnnnnnnnnnnnnnnnnnnnnnnnnnnnnnnnnnnnnnnnnnnnnnnnnnnnnnnnnnnnnnnnnnnnnnnnnnnnnnnnnnnnnnnnnnnnnnnnnnnnnnnnnnnnnnnnnnnnnnnnnnnnnnnnnnnnnnnnnnnnnnnnnnnnnnnnnnnnnnnnnnnnnnnnnnnnnnnnnnnnnnnnnnnnnnnnnnnnnnnnnnnnnnnnnnnnnnnnnnnnnnnnnnnnnnnnnnnnnnnnnnnnnnnnnnnnnnnnnnnnnnnnnnnnnnnnnnnnnnnnnnnnnnnnnnnnnnnnnnnnnnnnnnnnnnnnnnnnnnnnnnnnnnnnnnnnnnnnnnnnnnnnnnnnnnnnnnnnnnnnnnnnnnnnnnnnnnnnnnnnnnnnnnnnnnnnnnnnnnnnnnnnnnnnnnnnnnnnnnnnnnnnnnnnnnnnnnnnnnnnnnnnnnnnnnnnnnnnnnnnnnnnnnnnnnnnnnnnnnnnnnnnnnnnnnnnnnnnnnnnnnnnnnnnnnnnnnnnnnnnnnnnnnnnnnnnnnnnnnnnnnnnnnnnnnnnnnnnnnnnnnnnnnnnnnnnnnnnnnnnnnnnnnnnnnnnnnnnnnnnnnnnnnnnnnnnnnnnnnnnnnnnnnnnnnnnnnnnnnnnnnnnnnnnnnnnnnnnnnnnnnnnnnnnnnnnnnnnnnnnnnnnnnnnnnnnnnnnnnnnnnnnnnnnnnnnnnnnnnnnnnnnnnnnnnnnnnnnnnnnnnnnnnnnnnnnnnnnnnnnnnnnnnnnnnnnnnnnnnnnnnnnnnnnnnnnnnnnnnnnnnnnnnnnnnnnnnnnnnnnnnnnnnnnnnnnnnnnnnnnnnnnnnnnnnnnnnnnnnnnnnnnnnnnnnnnnnnnnnnnnnnnnnnnnnnnnnnnnnnnnnnnnnnnnnnnnnnnnnnnnnnnnnnnnnnnnnnnnnnnnnnnnnnnnnnnnnnnnnnnnnnnnnnnnnnnnnnnnnnnnnnnnnnnnnnnnnnnnnnnnnnnnnnnnnnnnnnnnnnnnnnnnnnnnnnnnnnnnnnnnnnnnnnnnnnnnnnnnnnnnnnnnnnnnnnnnnnnnnnnnnnnnnnnnnnnnnnnnnnnnnnnnnnnnnnnnnnnnnnnnnnnnnnnnnnnnnnnnnnnnnnnnnnnnnnnnnnnnnnnnnnnnnnnnnnnnnnnnnnnnnnnnnnnnnnnnnnnnnnnnnnnnnnnnnnnnnnnnnnnnnnnnnnnnnnnnnnnnnnnnnnnnnnnnnnnnnnnnnnnnnnnnnnnnnnnnnnnnnnnnnnnnnnnnnnnnnnnnnnnnnnnnnnnnnnnnnnnnnnnnnnnnnnnnnnnnnnnnnnnnnnnnnnnnnnnnnnnnnnnnnnnnnnnnnnnnnnnnnnnnnnnnnnnnnnnnnnnnnnnnnnnnnnnnnnnnnnnnnnnnnnnnnnnnnnnnnnnnnnnnnnnnnnnnnnnnnnnnnnnnnnnnnnnnnnnnnnnnnnnnnnnnnnnnnnnnnnnnnnnnnnnnnnnnnnnnnnnnnnnnnnnnnnnnnnnnnnnnnnnnnnnnnnnnnnnnnnnnnnnnnnnnnnnnnnnnnnnnnnnnnnnnnnnnnnnnnnnnnnnnnnnnnnnnnnnnnnnnnnnnnnnnnnnnnnnnnnnnnnnnnnnnnnnnnnnnnnnnnnnnnnnnnnnnnnnnnnnnnnnnnnnnnnnnnnnnnnnnnnnnnnnnnnnnnnnnnnnnnnnnnnnnnnnnnnnnnnnnnnnnnnnnnnnnnnnnnnnnnnnnnnnnnnnnnnnnnnnnnnnnnnnnnnnnnnnnnnnnnnnnnnnnnnnnnnnnnnnnnnnnnnnnnnnnnnnnnnnnnnnnnnnnnnnnnnnnnnnnnnnnnnnnnnnnnnnnnnnnnnnnnnnnnnnnnnnnnnnnnnnnnnnnnnnnnnnnnnnnnnnnnnnnnnnnnnnnnnnnnnnnnnnnnnnnnnnnnnnnnnnnnnnnnnnnnnnnnnnnnnnnnnnnnnnnnnnnnnnnnnnnnnnnnnnnnnnnnnnnnnnnnnnnnnnnnnnnnnnnnnnnnnnnnnnnnnnnnnnnnnnnnnnnnnnnnnnnnnnnnnnnnnnnnnnnnnnnnnnnnnnnnnnnnnnnnnnnnnnnnnnnnnnnnnnnnnnnnnnnnnnnnnnnnnnnnnnnnnnnnnnnnnnnnnnnnnnnnnnnnnnnnnnnnnnnnnnnnnnnnnnnnnnnnnnnnnnnnnnnnnnnnnnnnnnnnnnnnnnnnnnnnnnnnnnnnnnnnnnnnnnnnnnnnnnnnnnnnnnnnnnnnnnnnnnnnnnnnnnnnnnnnnnnnnnnnnnnnnnnnnnnnnnnnnnnnnnnnnnnnnnnnnnnnnnnnnnnnnnnnnnnnnnnnnnnnnnnnnnnnnnnnnnnnnnnnnnnnnnnnnnnnnnnnnnnnnnnnnnnnnnnnnnnnnnnnnnnnnnnnnnnnnnnnnnnnnnnnnnnnnnnnnnnnnnnnnnnnnnnnnnnnnnnnnnnnnnnnnnnnnnnnnnnnnnnnnnnnnnnnnnnnnnnnnnnnnnnnnnnnnnnnnnnnnnnnnnnnnnnnnnnnnnnnnnnnnnnnnnnnnnnnnnnnnnnnnnnnnnnnnnnnnnnnnnnnnnnnnnnnnnnnnnnnnnnnnnnnnnnnnnnnnnnnnnnnnnnnnnnnnnnnnnnnnnnnnnnnnnnnnnnnnnnnnnnnnnnnnnnnnnnnnnnnnnnnnnnnnnnnnnnnnnnnnnnnnnnnnnnnnnnnnnnnnnnnnnnnnnnnnnnnnnnnnnnnnnnnnnnnnnnnnnnnnnnnnnnnnnnnnnnnnnnnnnnnnnnnnnnnnnnnnnnnnnnnnnnnnnnnnnnnnnnnnnnnnnnnnnnnnnnnnnnnnnnnnnnnnnnnnnnnnnnnnnnnnnnnnnnnnnnnnnnnnnnnnnnnnnnnnnnnnnnnnnnnnnnnnnnnnnnnnnnnnnnnnnnnnnnnnnnnnnnnnnnnnnnnnnnnnnnnnnnnnnnnnnnnnnnnnnnnnnnnnnnnnnnnnnnnnnnnnnnnnnnnnnnnnnnnnnnnnnnnnnnnnnnnnnnnnnnnnnnnnnnnnnnnnnnnnnnnnnnnnnnnnnnnnnnnnnnnnnnnnnnnnnnnnnnnnnnnnnnnnnnnnnnnnnnnnnnnnnnnnnnnnnnnnnnnnnnnnnnnnnnnnnnnnnnnnnnnnnnnnnnnnnnnnnnnnnnnnnnnnnnnnnnnnnnnnnnnnnnnnnnnnnnnnnnnnnnnnnnnnnnnnnnnnnnnnnnnnnnnnnnnnnnnnnnnnnnnnnnnnnnnnnnnnnnnnnnnnnnnnnnnnnnnnnnnnnnnnnnnnnnnnnnnnnnnnnnnnnnnnnnnnnnnnnnnnnnnnnnnnnnnnnnnnnnnnnnnnnnnnnnnnnnnnnnnnnnnnnnnnnnnnnnnnnnnnnnnnnnnnnnnnnnnnnnnnnnnnnnnnnnnnnnnnnnnnnnnnnnnnnnnnnnnnnnnnnnnnnnnnnnnnnnnnnnnnnnnnnnnnnnnnnnnnnnnnnnnnnnnnnnnnnnnnnnnnnnnnnnnnnnnnnnnnnnnnnnnnnnnnnnnnnnnnnnnnnnnnnnnnnnnnnnnnnnnnnnnnnnnnnnnnnnnnnnnnnnnnnnnnnnnnnnnnnnnnnnnnnnnnnnnnnnnnnnnnnnnnnnnnnnnnnnnnnnnnnnnnnnnnnnnnnnnnnnnnnnnnnnnnnnnnnnnnnnnnnnnnnnnnnnnnnnnnnnnnnnnnnnnnnnnnnnnnnnnnnnnnnnnnnnnnnnnnnnnnnnnnnnnnnnnnnnnnnnnnnnnnnnnnnnnnnnnnnnnnnnnnnnnnnnnnnnnnnnnnnnnnnnnnnnnnnnnnnnnnnnnnnnnnnnnnnnnnnnnnnnnnnnnnnnnnnnnnnnnnnnnnnnnnnnnnnnnnnnnnnnnnnnnnnnnnnnnnnnnnnnnnnnnnnnnnnnnnnnnnnnnnnnnnnnnnnnnnnnnnnnnnnnnnnnnnnnnnnnnnnnnnnnnnnnnnnnnnnnnnnnnnnnnnnnnnnnnnnnnnnnnnnnnnnnnnnnnnnnnnnnnnnnnnnnnnnnnnnnnnnnnnnnnnnnnnnnnnnnnnnnnnnnnnnnnnnnnnnnnnnnnnnnnnnnnnnnnnnnnnnnnnnnnnnnnnnnnnnnnnnnnnnnnnnnnnnnnnnnnnnnnnnnnnnnnnnnnnnnnnnnnnnnnnnnnnnnnnnnnnnnnnnnnnnnnnnnnnnnnnnnnnnnnnnnnnnnnnnnnnnnnnnnnnnnnnnnnnnnnnnnnnnnnnnnnnnnnnnnnnnnnnnnnnnnnnnnnnnnnnnnnnnnnnnnnnnnnnnnnnnnnnnnnnnnnnnnnnnnnnnnnnnnnnnnnnnnnnnnnnnnnnnnnnnnnnnnnnnnnnnnnnnnnnnnnnnnnnnnnnnnnnnnnnnnnnnnnnnnnnnnnnnnnnnnnnnnnnnnnnnnnnnnnnnnnnnnnnnnnnnnnnnnnnnnnnnnnnnnnnnnnnnnnnnnnnnnnnnnnnnnnnnnnnnnnnnnnnnnnnnnnnnnnnnnnnnnnnnnnnnnnnnnnnnnnnnnnnnnnnnnnnnnnnnnnnnnnnnnnnnnnnnnnnnnnnnnnnnnnnnnnnnnnnnnnnnnnnnnnnnnnnnnnnnnnnnnnnnnnnnnnnnnnnnnnnnnnnnnnnnnnnnnnnnnnnnnnnnnnnnnnnnnnnnnnnnnnnnnnnnnnnnnnnnnnnnnnnnnnnnnnnnnnnnnnnnnnnnnnnnnnnnnnnnnnnnnnnnnnnnnnnnnnnnnnnnnnnnnnnnnnnnnnnnnnnnnnnnnnnnnnnnnnnnnnnnnnnnnnnnnnnnnnnnnnnnnnnnnnnnnnnnnnnnnnnnnnnnnnnnnnnnnnnnnnnnnnnnnnnnnnnnnnnnnnnnnnnnnnnnnnnnnnnnnnnnnnnnnnnnnnnnnnnnnnnnnnnnnnnnnnnnnnnnnnnnnnnnnnnnnnnnnnnnnnnnnnnnnnnnnnnnnnnnnnnnnnnnnnnnnnnnnnnnnnnnnnnnnnnnnnnnnnnnnnnnnnnnnnnnnnnnnnnnnnnnnnnnnnnnnnnnnnnnnnnnnnnnnnnnnnnnnnnnnnnnnnnnnnnnnnnnnnnnnnnnnnnnnnnnnnnnnnnnnnnnnnnnnnnnnnnnnnnnnnnnnnnnnnnnnnnnnnnnnnnnnnnnnnnnnnnnnnnnnnnnnnnnnnnnnnnnnnnnnnnnnnnnnnnnnnnnnnnnnnnnnnnnnnnnnnnnnnnnnnnnnnnnnnnnnnnnnnnnnnnnnnnnnnnnnnnnnnnnnnnnnnnnnnnnnnnnnnnnnnnnnnnnnnnnnnnnnnnnnnnnnnnnnnnnnnnnnnnnnnnnnnnnnnnnnnnnnnnnnnnnnnnnnnnnnnnnnnnnnnnnnnnnnnnnnnnnnnnnnnnnnnnnnnnnnnnnnnnnnnnnnnnnnnnnnnnnnnnnnnnnnnnnnnnnnnnnnnnnnnnnnnnnnnnnnnnnnnnnnnnnnnnnnnnnnnnnnnnnnnnnnnnnnnnnnnnnnnnnnnnnnnnnnnnnnnnnnnnnnnnnnnnnnnnnnnnnnnnnnnnnnnnnnnnnnnnnnnnnnnnnnnnnnnnnnnnnnnnnnnnnnnnnnnnnnnnnnnnnnnnnnnnnnnnnnnnnnnnnnnnnnnnnnnnnnnnnnnnnnnnnnnnnnnnnnnnnnnnnnnnnnnnnnnnnnnnnnnnnnnnnnnnnnnnnnnnnnnnnnnnnnnnnnnnnnnnnnnnnnnnnnnnnnnnnnnnnnnnnnnnnnnnnnnnnnnnnnnnnnnnnnnnnnnnnnnnnnnnnnnnnnnnnnnnnnnnnnnnnnnnnnnnnnnnnnnnnnnnnnnnnnnnnnnnnnnnnnnnnnnnnnnnnnnnnnnnnnnnnnnnnnnnnnnnnnnnnnnnnnnnnnnnnnnnnnnnnnnnnnnnnnnnnnnnnnnnnnnnnnnnnnnnnnnnnnnnnnnnnnnnnnnnnnnnnnnnnnnnnnnnnnnnnnnnnnnnnnnnnnnnnnnnnnnnnnnnnnnnnnnnnnnnnnnnnnnnnnnnnnnnnnnnnnnnnnnnnnnnnnnnnnnnnnnnnnnnnnnnnnnnnnnnnnnnnnnnnnnnnnnnnnnnnnnnnnnnnnnnnnnnnnnnnnnnnnnnnnnnnnnnnnnnnnnnnnnnnnnnnnnnnnnnnnnnnnnnnnnnnnnnnnnnnnnnnnnnnnnnnnnnnnnnnnnnnnnnnnnnnnnnnnnnnnnnnnnnnnnnnnnnnnnnnnnnnnnnnnnnnnnnnnnnnnnnnnnnnnnnnnnnnnnnnnnnnnnnnnnnnnnnnnnnnnnnnnnnnnnnnnnnnnnnnnnnnnnnnnnnnnnnnnnnnnnnnnnnnnnnnnnnnnnnnnnnnnnnnnnnnnnnnnnnnnnnnnnnnnnnnnnnnnnnnnnnnnnnnnnnnnnnnnnnnnnnnnnnnnnnnnnnnnnnnnnnnnnnnnnnnnnnnnnnnnnnnnnnnnnnnnnnnnnnnnnnnnnnnnnnnnnnnnnnnnnnnnnnnnnnnnnnnnnnnnnnnnnnnnnnnnnnnnnnnnnnnnnnnnnnnnnnnnnnnnnnnnnnnnnnnnnnnnnnnnnnnnnnnnnnnnnnnnnnnnnnnnnnnnnnnnnnnnnnnnnnnnnnnnnnnnnnnnnnnnnnnnnnnnnnnnnnnnnnnnnnnnnnnnnnnnnnnnnnnnnnnnnnnnnnnnnnnnnnnnnnnnnnnnnnnnnnnnnnnnnnnnnnnnnnnnnnnnnnnnnnnnnnnnnnnnnnnnnnnnnnnnnnnnnnnnnnnnnnnnnnnnnnnnnnnnnnnnnnnnnnnnnnnnnnnnnnnnnnnnnnnnnnnnnnnnnnnnnnnnnnnnnnnnnnnnnnnnnnnnnnnnnnnnnnnnnnnnnnnnnnnnnnnnnnnnnnnnnnnnnnnnnnnnnnnnnnnnnnnnnnnnnnnnnnnnnnnnnnnnnnnnnnnnnnnnnnnnnnnnnnnnnnnnnnnnnnnnnnnnnnnnnnnnnnnnnnnnnnnnnnnnnnnnnnnnnnnnnnnnnnnnnnnnnnnnnnnnnnnnnnnnnnnnnnnnnnnnnnnnnnnnnnnnnnnnnnnnnnnnnnnnnnnnnnnnnnnnnnnnnnnnnnnnnnnnnnnnnnnnnnnnnnnnnnnnnnnnnnnnnnnnnnnnnnnnnnnnnnnnnnnnnnnnnnnnnnnnnnnnnnnnnnnnnnnnnnnnnnnnnnnnnnnnnnnnnnnnnnnnnnnnnnnnnnnnnnnnnnnnnnnnnnnnnnnnnnnnnnnnnnnnnnnnnnnnnnnnnnnnnnnnnnnnnnnnnnnnnnnnnnnnnnnnnnnnnnnnnnnnnnnnnnnnnnnnnnnnnnnnnnnnnnnnnnnnnnnnnnnnnnnnnnnnnnnnnnnnnnnnnnnnnnnnnnnnnnnnnnnnnnnnnnnnnnnnnnnnnnnnnnnnnnnnnnnnnnnnnnnnnnnnnnnnnnnnnnnnnnnnnnnnnnnnnnnnnnnnnnnnnnnnnnnnnnnnnnnnnnnnnnnnnnnnnnnnnnnnnnnnnnnnnnnnnnnnnnnnnnnnnnnnnnnnnnnnnnnnnnnnnnnnnnnnnnnnnnnnnnnnnnnnnnnnnnnnnnnnnnnnnnnnnnnnnnnnnnnnnnnnnnnnnnnnnnnnnnnnnnnnnnnnnnnnnnnnnnnnnnnnnnnnnnnnnnnnnnnnnnnnnnnnnnnnnnnnnnnnnnnnnnnnnnnnnnnnnnnnnnnnnnnnnnnnnnnnnnnnnnnnnnnnnnnnnnnnnnnnnnnnnnnnnnnnnnnnnnnnnnnnnnnnnnnnnnnnnnnnnnnnnnnnnnnnnnnnnnnnnnnnnnnnnnnnnnnnnnnnnnnnnnnnnnnnnnnnnnnnnnnnnnnnnnnnnnnnnnnnnnnnnnnnnnnnnnnnnnnnnnnnnnnnnnnnnnnnnnnnnnnnnnnnnnnnnnnnnnnnnnnnnnnnnnnnnnnnnnnnnnnnnnnnnnnnnnnnnnnnnnnnnnnnnnnnnnnnnnnnnnnnnnnnnnnnnnnnnnnnnnnnnnnnnnnnnnnnnnnnnnnnnnnnnnnnnnnnnnnnnnnnnnnnnnnnnnnnnnnnnnnnnnnnnnnnnnnnnnnnnnnnnnnnnnnnnnnnnnnnnnnnnnnnnnnnnnnnnnnnnnnnnnnnnnnnnnnnnnnnnnnnnnnnnnnnnnnnnnnnnnnnnnnnnnnnnnnnnnnnnnnnnnnnnnnnnnnnnnnnnnnnnnnnnnnnnnnnnnnnnnnnnnnnnnnnnnnnnnnnnnnnnnnnnnnnnnnnnnnnnnnnnnnnnnnnnnnnnnnnnnnnnnnnnnnnnnnnnnnnnnnnnnnnnnnnnnnnnnnnnnnnnnnnnnnnnnnnnnnnnnnnnnnnnnnnnnnnnnnnnnnnnnnnnnnnnnnnnnnnnnnnnnnnnnnnnnnnnnnnnnnnnnnnnnnnnnnnnnnnnnnnnnnnnnnnnnnnnnnnnnnnnnnnnnnnnnnnnnnnnnnnnnnnnnnnnnnnnnnnnnnnnnnnnnnnnnnnnnnnnnnnnnnnnnnnnnnnnnnnnnnnnnnnnnnnnnnnnnnnnnnnnnnnnnnnnnnnnnnnnnnnnnnnnnnnnnnnnnnnnnnnnnnnnnnnnnnnnnnnnnnnnnnnnnnnnnnnnnnnnnnnnnnnnnnnnnnnnnnnnnnnnnnnnnnnnnnnnnnnnnnnnnnnnnnnnnnnnnnnnnnnnnnnnnnnnnnnnnnnnnnnnnnnnnnnnnnnnnnnnnnnnnnnnnnnnnnnnnnnnnnnnnnnnnnnnnnnnnnnnnnnnnnnnnnnnnnnnnnnnnnnnnnnnnnnnnnnnnnnnnnnnnnnnnnnnnnnnnnnnnnnnnnnnnnnnnnnnnnnnnnnnnnnnnnnnnnnnnnnnnnnnnnnnnnnnnnnnnnnnnnnnnnnnnnnnnnnnnnnnnnnnnnnnnnnnnnnnnnnnnnnnnnnnnnnnnnnnnnnnnnnnnnnnnnnnnnnnnnnnnnnnnnnnnnnnnnnnnnnnnnnnnnnnnnnnnnnnnnnnnnnnnnnnnnnnnnnnnnnnnnnnnnnnnnnnnnnnnnnnnnnnnnnnnnnnnnnnnnnnnnnnnnnnnnnnnnnnnnnnnnnnnnnnnnnnnnnnnnnnnnnnnnnnnnnnnnnnnnnnnnnnnnnnnnnnnnnnnnnnnnnnnnnnnnnnnnnnnnnnnnnnnnnnnnnnnnnnnnnnnnnnnnnnnnnnnnnnnnnnnnnnnnnnnnnnnnnnnnnnnnnnnnnnnnnnnnnnnnnnnnnnnnnnnnnnnnnnnnnnnnnnnnnnnnnnnnnnnnnnnnnnnnnnnnnnnnnnnnnnnnnnnnnnnnnnnnnnnnnnnnnnnnnnnnnnnnnnnnnnnnnnnnnnnnnnnnnnnnnnnnnnnnnnnnnnnnnnnnnnnnnnnnnnnnnnnnnnnnnnnnnnnnnnnnnnnnnnnnnnnnnnnnnnnnnnnnnnnnnnnnnnnnnnnnnnnnnnnnnnnnnnnnnnnnnnnnnnnnnnnnnnnnnnnnnnnnnnnnnnnnnnnnnnnnnnnnnnnnnnnnnnnnnnnnnnnnnnnnnnnnnnnnnnnnnnnnnnnnnnnnnnnnnnnnnnnnnnnnnnnnnnnnnnnnnnnnnnnnnnnnnnnnnnnnnnnnnnnnnnnnnnnnnnnnnnnnnnnnnnnnnnnnnnnnnnnnnnnnnnnnnnnnnnnnnnnnnnnnnnnnnnnnnnnnnnnnnnnnnnnnnnnnnnnnnnnnnnnnnnnnnnnnnnnnnnnnnnnnnnnnnnnnnnnnnnnnnnnnnnnnnnnnnnnnnnnnnnnnnnnnnnnnnnnnnnnnnnnnnnnnnnnnnnnnnnnnnnnnnnnnnnnnnnnnnnnnnnnnnnnnnnnnnnnnnnnnnnnnnnnnnnnnnnnnnnnnnnnnnnnnnnnnnnnnnnnnnnnnnnnnnnnnnnnnnnnnnnnnnnnnnnnnnnnnnnnnnnnnnnnnnnnnnnnnnnnnnnnnnnnnnnnnnnnnnnnnnnnnnnnnnnnnnnnnnnnnnnnnnnnnnnnnnnnnnnnnnnnnnnnnnnnnnnnnnnnnnnnnnnnnnnnnnnnnnnnnnnnnnnnnnnnnnnnnnnnnnnnnnnnnnnnnnnnnnnnnnnnnnnnnnnnnnnnnnnnnnnnnnnnnnnnnnnnnnnnnnnnnnnnnnnnnnnnnnnnnnnnnnnnnnnnnnnnnnnnnnnnnnnnnnnnnnnnnnnnnnnnnnnnnnnnnnnnnnnnnnnnnnnnnnnnnnnnnnnnnnnnnnnnnnnnnnnnnnnnnnnnnnnnnnnnnnnnnnnnnnnnnnnnnnnnnnnnnnnnnnnnnnnnnnnnnnnnnnnnnnnnnnnnnnnnnnnnnnnnnnnnnnnnnnnnnnnnnnnnnnnnnnnnnnnnnnnnnnnnnnnnnnnnnnnnnnnnnnnnnnnnnnnnnnnnnnnnnnnnnnnnnnnnnnnnnnnnnnnnnnnnnnnnnnnnnnnnnnnnnnnnnnnnnnnnnnnnnnnnnnnnnnnnnnnnnnnnnnnnnnnnnnnnnnnnnnnnnnnnnnnnnnnnnnnnnnnnnnnnnnnnnnnnnnnnnnnnnnnnnnnnnnnnnnnnnnnnnnnnnnnnnnnnnnnnnnnnnnnnnnnnnnnnnnnnnnnnnnnnnnnnnnnnnnnnnnnnnnnnnnnnnnnnnnnnnnnnnnnnnnnnnnnnnnnnnnnnnnnnnnnnnnnnnnnnnnnnnnnnnnnnnnnnnnnnnnnnnnnnnnnnnnnnnnnnnnnnnnnnnnnnnnnnnnnnnnnnnnnnnnnnnnnnnnnnnnnnnnnnnnnnnnnnnnnnnnnnnnnnnnnnnnnnnnnnnnnnnnnnnnnnnnnnnnnnnnnnnnnnnnnnnnnnnnnnnnnnnnnnnnnnnnnnnnnnnnnnnnnnnnnnnnnnnnnnnnnnnnnnnnnnnnnnnnnnnnnnnnnnnnnnnnnnnnnnnnnnnnnnnnnnnnnnnnnnnnnnnnnnnnnnnnnnnnnnnnnnnnnnnnnnnnnnnnnnnnnnnnnnnnnnnnnnnnnnnnnnnnnnnnnnnnnnnnnnnnnnnnnnnnnnnnnnnnnnnnnnnnnnnnnnnnnnnnnnnnnnnnnnnnnnnnnnnnnnnnnnnnnnnnnnnnnnnnnnnnnnnnnnnnnnnnnnnnnnnnnnnnnnnnnnnnnnnnnnnnnnnnnnnnnnnnnnnnnnnnnnnnnnnnnnnnnnnnnnnnnnnnnnnnnnnnnnnnnnnnnnnnnnnnnnnnnnnnnnnnnnnnnnnnnnnnnnnnnnnnnnnnnnnnnnnnnnnnnnnnnnnnnnnnnnnnnnnnnnnnnnnnnnnnnnnnnnnnnnnnnnnnnnnnnnnnnnnnnnnnnnnnnnnnnnnnnnnnnnnnnnnnnnnnnnnnnnnnnnnnnnnnnnnnnnnnnnnnnnnnnnnnnnnnnnnnnnnnnnnnnnnnnnnnnnnnnnnnnnnnnnnnnnnnnnnnnnnnnnnnnnnnnnnnnnnnnnnnnnnnnnnnnnnnnnnnnnnnnnnnnnnnnnnnnnnnnnnnnnnnnnnnnnnnnnnnnnnnnnnnnnnnnnnnnnnnnnnnnnnnnnnnnnnnnnnnnnnnnnnnnnnnnnnnnnnnnnnnnnnnnnnnnnnnnnnnnnnnnnnnnnnnnnnnnnnnnnnnnnnnnnnnnnnnnnnnnnnnnnnnnnnnnnnnnnnnnnnnnnnnnnnnnnnnnnnnnnnnnnnnnnnnnnnnnnnnnnnnnnnnnnnnnnnnnnnnnnnnnnnnnnnnnnnnnnnnnnnnnnnnnnnnnnnnnnnnnnnnnnnnnnnnnnnnnnnnnnnnnnnnnnnnnnnnnnnnnnnnnnnnnnnnnnnnnnnnnnnnnnnnnnnnnnnnnnnnnnnnnnnnnnnnnnnnnnnnnnnnnnnnnnnnnnnnnnnnnnnnnnnnnnnnnnnnnnnnnnnnnnnnnnnnnnnnnnnnnnnnnnnnnnnnnnnnnnnnnnnnnnnnnnnnnnnnnnnnnnnnnnnnnnnnnnnnnnnnnnnnnnnnnnnnnnnnnnnnnnnnnnnnnnnnnnnnnnnnnnnnnnnnnnnnnnnnnnnnnnnnnnnnnnnnnnnnnnnnnnnnnnnnnnnnnnnnnnnnnnnnnnnnnnnnnnnnnnnnnnnnnnnnnnnnnnnnnnnnnnnnnnnnnnnnnnnnnnnnnnnnnnnnnnnnnnnnnnnnnnnnnnnnnnnnnnnnnnnnnnnnnnnnnnnnnnnnnnnnnnnnnnnnnnnnnnnnnnnnnnnnnnnnnnnnnnnnnnnnnnnnnnnnnnnnnnnnnnnnnnnnnnnnnnnnnnnnnnnnnnnnnnnnnnnnnnnnnnnnnnnnnnnnnnnnnnnnnnnnnnnnnnnnnnnnnnnnnnnnnnnnnnnnnnnnnnnnnnnnnnnnnnnnnnnnnnnnnnnnnnnnnnnnnnnnnnnnnnnnnnnnnnnnnnnnnnnnnnnnnnnnnnnnnnnnnnnnnnnnnnnnnnnnnnnnnnnnnnnnnnnnnnnnnnnnnnnnnnnnnnnnnnnnnnnnnnnnnnnnnnnnnnnnnnnnnnnnnnnnnnnnnnnnnnnnnnnnnnnnnnnnnnnnnnnnnnnnnnnnnnnnnnnnnnnnnnnnnnnnnnnnnnnnnnnnnnnnnnnnnnnnnnnnnnnnnnnnnnnnnnnnnnnnnnnnnnnnnnnnnnnnnnnnnnnnnnnnnnnnnnnnnnnnnnnnnnnnnnnnnnnnnnnnnnnnnnnnnnnnnnnnnnnnnnnnnnnnnnnnnnnnnnnnnnnnnnnnnnnnnnnnnnnnnnnnnnnnnnnnnnnnnnnnnnnnnnnnnnnnnnnnnnnnnnnnnnnnnnnnnnnnnnnnnnnnnnnnnnnnnnnnnnnnnnnnnnnnnnnnnnnnnnnnnnnnnnnnnnnnnnnnnnnnnnnnnnnnnnnnnnnnnnnnnnnnnnnnnnnnnnnnnnnnnnnnnnnnnnnnnnnnnnnnnnnnnnnnnnnnnnnnnnnnnnnnnnnnnnnnnnnnnnnnnnnnnnnnnnnnnnnnnnnnnnnnnnnnnnnnnnnnnnnnnnnnnnnnnnnnnnnnnnnnnnnnnnnnnnnnnnnnnnnnnnnnnnnnnnnnnnnnnnnnnnnnnnnnnnnnnnnnnnnnnnnnnnnnnnnnnnnnnnnnnnnnnnnnnnnnnnnnnnnnnnnnnnnnnnnnnnnnnnnnnnnnnnnnnnnnnnnnnnnnnnnnnnnnnnnnnnnnnnnnnnnnnnnnnnnnnnnnnnnnnnnnnnnnnnnnnnnnnnnnnnnnnnnnnnnnnnnnnnnnnnnnnnnnnnnnnnnnnnnnnnnnnnnnnnnnnnnnnnnnnnnnnnnnnnnnnnnnnnnnnnnnnnnnnnnnnnnnnnnnnnnnnnnnnnnnnnnnnnnnnnnnnnnnnnnnnnnnnnnnnnnnnnnnnnnnnnnnnnnnnnnnnnnnnnnnnnnnnnnnnnnnnnnnnnnnnnnnnnnnnnnnnnnnnnnnnnnnnnnnnnnnnnnnnnnnnnnnnnnnnnnnnnnnnnnnnnnnnnnnnnnnnnnnnnnnnnnnnnnnnnnnnnnnnnnnnnnnnnnnnnnnnnnnnnnnnnnnnnnnnnnnnnnnnnnnnnnnnnnnnnnnnnnnnnnnnnnnnnnnnnnnnnnnnnnnnnnnnnnnnnnnnnnnnnnnnnnnnnnnnnnnnnnnnnnnnnnnnnnnnnnnnnnnnnnnnnnnnnnnnnnnnnnnnnnnnnnnnnnnnnnnnnnnnnnnnnnnnnnnnnnnnnnnnnnnnnnnnnnnnnnnnnnnnnnnnnnnnnnnnnnnnnnnnnnnnnnnnnnnnnnnnnnnnnnnnnnnnnnnnnnnnnnnnnnnnnnnnnnnnnnnnnnnnnnnnnnnnnnnnnnnnnnnnnnnnnnnnnnnnnnnnnnnnnnnnnnnnnnnnnnnnnnnnnnnnnnnnnnnnnnnnnnnnnnnnnnnnnnnnnnnnnnnnnnnnnnnnnnnnnnnnnnnnnnnnnnnnnnnnnnnnnnnnnnnnnnnnnnnnnnnnnnnnnnnnnnnnnnnnnnnnnnnnnnnnnnnnnnnnnnnnnnnnnnnnnnnnnnnnnnnnnnnnnnnnnnnnnnnnnnnnnnnnnnnnnnnnnnnnnnnnnnnnnnnnnnnnnnnnnnnnnnnnnnnnnnnnnnnnnnnnnnnnnnnnnnnnnnnnnnnnnnnnnnnnnnnnnnnnnnnnnnnnnnnnnnnnnnnnnnnnnnnnnnnnnnnnnnnnnnnnnnnnnnnnnnnnnnnnnnnnnnnnnnnnnnnnnnnnnnnnnnnnnnnnnnnnnnnnnnnnnnnnnnnnnnnnnnnnnnnnnnnnnnnnnnnnnnnnnnnnnnnnnnnnnnnnnnnnnnnnnnnnnnnnnnnnnnnnnnnnnnnnnnnnnnnnnnnnnnnnnnnnnnnnnnnnnnnnnnnnnnnnnnnnnnnnnnnnnnnnnnnnnnnnnnnnnnnnnnnnnnnnnnnnnnnnnnnnnnnnnnnnnnnnnnnnnnnnnnnnnnnnnnnnnnnnnnnnnnnnnnnnnnnnnnnnnnnnnnnnnnnnnnnnnnnnnnnnnnnnnnnnnnnnnnnnnnnnnnnnnnnnnnnnnnnnnnnnnnnnnnnnnnnnnnnnnnnnnnnnnnnnnnnnnnnnnnnnnnnnnnnnnnnnnnnnnnnnnnnnnnnnnnnnnnnnnnnnnnnnnnnnnnnnnnnnnnnnnnnnnnnnnnnnnnnnnnnnnnnnnnnnnnnnnnnnnnnnnnnnnnnnnnnnnnnnnnnnnnnnnnnnnnnnnnnnnnnnnnnnnnnnnnnnnnnnnnnnnnnnnnnnnnnnnnnnnnnnnnnnnnnnnnnnnnnnnnnnnnnnnnnnnnnnnnnnnnnnnnnnnnnnnnnnnnnnnnnnnnnnnnnnnnnnnnnnnnnnnnnnnnnnnnnnnnnnnnnnnnnnnnnnnnnnnnnnnnnnnnnnnnnnnnnnnnnnnnnnnnnnnnnnnnnnnnnnnnnnnnnnnnnnnnnnnnnnnnnnnnnnnnnnnnnnnnnnnnnnnnnnnnnnnnnnnnnnnnnnnnnnnnnnnnnnnnnnnnnnnnnnnnnnnnnnnnnnnnnnnnnnnnnnnnnnnnnnnnnnnnnnnnnnnnnnnnnnnnnnnnnnnnnnnnnnnnnnnnnnnnnnnnnnnnnnnnnnnnnnnnnnnnnnnnnnnnnnnnnnnnnnnnnnnnnnnnnnnnnnnnnnnnnnnnnnnnnnnnnnnnnnnnnnnnnnnnnnnnnnnnnnnnnnnnnnnnnnnnnnnnnnnnnnnnnnnnnnnnnnnnnnnnnnnnnnnnnnnnnnnnnnnnnnnnnnnnnnnnnnnnnnnnnnnnnnnnnnnnnnnnnnnnnnnnnnnnnnnnnnnnnnnnnnnnnnnnnnnnnnnnnnnnnnnnnnnnnnnnnnnnnnnnnnnnnnnnnnnnnnnnnnnnnnnnnnnnnnnnnnnnnnnnnnnnnnnnnnnnnnnnnnnnnnnnnnnnnnnnnnnnnnnnnnnnnnnnnnnnnnnnnnnnnnnnnnnnnnnnnnnnnnnnnnnnnnnnnnnnnnnnnnnnnnnnnnnnnnnnnnnnnnnnnnnnnnnnnnnnnnnnnnnnnnnnnnnnnnnnnnnnnnnnnnnnnnnnnnnnnnnnnnnnnnnnnnnnnnnnnnnnnnnnnnnnnnnnnnnnnnnnnnnnnnnnnnnnnnnnnnnnnnnnnnnnnnnnnnnnnnnnnnnnnnnnnnnnnnnnnnnnnnnnnnnnnnnnnnnnnnnnnnnnnnnnnnnnnnnnnnnnnnnnnnnnnnnnnnnnnnnnnnnnnnnnnnnnnnnnnnnnnnnnnnnnnnnnnnnnnnnnnnnnnnnnnnnnnnnnnnnnnnnnnnnnnnnnnnnnnnnnnnnnnnnnnnnnnnnnnnnnnnnnnnnnnnnnnnnnnnnnnnnnnnnnnnnnnnnnnnnnnnnnnnnnnnnnnnnnnnnnnnnnnnnnnnnnnnnnnnnnnnnnnnnnnnnnnnnnnnnnnnnnnnnnnnnnnnnnnnnnnnnnnnnnnnnnnnnnnnnnnnnnnnnnnnnnnnnnnnnnnnnnnnnnnnnnnnnnnnnnnnnnnnnnnnnnnnnnnnnnnnnnnnnnnnnnnnnnnnnnnnnnnnnnnnnnnnnnnnnnnnnnnnnnnnnnnnnnnnnnnnnnnnnnnnnnnnnnnnnnnnnnnnnnnnnnnnnnnnnnnnnnnnnnnnnnnnnnnnnnnnnnnnnnnnnnnnnnnnnnnnnnnnnnnnnnnnnnnnnnnnnnnnnnnnnnnnnnnnnnnnnnnnnnnnnnnnnnnnnnnnnnnnnnnnnnnnnnnnnnnnnnnnnnnnnnnnnnnnnnnnnnnnnnnnnnnnnnnnnnnnnnnnnnnnnnnnnnnnnnnnnnnnnnnnnnnnnnnnnnnnnnnnnnnnnnnnnnnnnnnnnnnnnnnnnnnnnnnnnnnnnnnnnnnnnnnnnnnnnnnnnnnnnnnnnnnnnnnnnnnnnnnnnnnnnnnnnnnnnnnnnnnnnnnnnnnnnnnnnnnnnnnnnnnnnnnnnnnnnnnnnnnnnnnnnnnnnnnnnnnnnnnnnnnnnnnnnnnnnnnnnnnnnnnnnnnnnnnnnnnnnnnnnnnnnnnnnnnnnnnnnnnnnnnnnnnnnnnnnnnnnnnnnnnnnnnnnnnnnnnnnnnnnnnnnnnnnnnnnnnnnnnnnnnnnnnnnnnnnnnnnnnnnnnnnnnnnnnnnnnnnnnnnnnnnnnnnnnnnnnnnnnnnnnnnnnnnnnnnnnnnnnnnnnnnnnnnnnnnnnnnnnnnnnnnnnnnnnnnnnnnnnnnnnnnnnnnnnnnnnnnnnnnnnnnnnnnnnnnnnnnnnnnnnnnnnnnnnnnnnnnnnnnnnnnnnnnnnnnnnnnnnnnnnnnnnnnnnnnnnnnnnnnnnnnnnnnnnnnnnnnnnnnnnnnnnnnnnnnnnnnnnnnnnnnnnnnnnnnnnnnnnnnnnnnnnnnnnnnnnnnnnnnnnnnnnnnnnnnnnnnnnnnnnnnnnnnnnnnnnnnnnnnnnnnnnnnnnnnnnnnnnnnnnnnnnnnnnnnnnnnnnnnnnnnnnnnnnnnnnnnnnnnnnnnnnnnnnnnnnnnnnnnnnnnnnnnnnnnnnnnnnnnnnnnnnnnnnnnnnnnnnnnnnnnnnnnnnnnnnnnnnnnnnnnnnnnnnnnnnnnnnnnnnnnnnnnnnnnnnnnnnnnnnnnnnnnnnnnnnnnnnnnnnnnnnnnnnnnnnnnnnnnnnnnnnnnnnnnnnnnnnnnnnnnnnnnnnnnnnnnnnnnnnnnnnnnnnnnnnnnnnnnnnnnnnnnnnnnnnnnnnnnnnnnnnnnnnnnnnnnnnnnnnnnnnnnnnnnnnnnnnnnnnnnnnnnnnnnnnnnnnnnnnnnnnnnnnnnnnnnnnnnnnnnnnnnnnnnnnnnnnnnnnnnnnnnnnnnnnnnnnnnnnnnnnnnnnnnnnnnnnnnnnnnnnnnnnnnnnnnnnnnnnnnnnnnnnnnnnnnnnnnnnnnnnnnnnnnnnnnnnnnnnnnnnnnnnnnnnnnnnnnnnnnnnnnnnnnnnnnnnnnnnnnnnnnnnnnnnnnnnnnnnnnnnnnnnnnnnnnnnnnnnnnnnnnnnnnnnnnnnnnnnnnnnnnnnnnnnnnnnnnnnnnnnnnnnnnnnnnnnnnnnnnnnnnnnnnnnnnnnnnnnnnnnnnnnnnnnnnnnnnnnnnnnnnnnnnnnnnnnnnnnnnnnnnnnnnnnnnnnnnnnnnnnnnnnnnnnnnnnnnnnnnnnnnnnnnnnnnnnnnnnnnnnnnnnnnnnnnnnnnnnnnnnnnnnnnnnnnnnnnnnnnnnnnnnnnnnnnnnnnnnnnnnnnnnnnnnnnnnnnnnnnnnnnnnnnnnnnnnnnnnnnnnnnnnnnnnnnnnnnnnnnnnnnnnnnnnnnnnnnnnnnnnnnnnnnnnnnnnnnnnnnnnnnnnnnnnnnnnnnnnnnnnnnnnnnnnnnnnnnnnnnnnnnnnnnnnnnnnnnnnnnnnnnnnnnnnnnnnnnnnnnnnnnnnnnnnnnnnnnnnnnnnnnnnnnnnnnnnnnnnnnnnnnnnnnnnnnnnnnnnnnnnnnnnnnnnnnnnnnnnnnnnnnnnnnnnnnnnnnnnnnnnnnnnnnnnnnnnnnnnnnnnnnnnnnnnnnnnnnnnnnnnnnnnnnnnnnnnnnnnnnnnnnnnnnnnnnnnnnnnnnnnnnnnnnnnnnnnnnnnnnnnnnnnnnnnnnnnnnnnnnnnnnnnnnnnnnnnnnnnnnnnnnnnnnnnnnnnnnnnnnnnnnnnnnnnnnnnnnnnnnnnnnnnnnnnnnnnnnnnnnnnnnnnnnnnnnnnnnnnnnnnnnnnnnnnnnnnnnnnnnnnnnnnnnnnnnnnnnnnnnnnnnnnnnnnnnnnnnnnnnnnnnnnnnnnnnnnnnnnnnnnnnnnnnnnnnnnnnnnnnnnnnnnnnnnnnnnnnnnnnnnnnnnnnnnnnnnnnnnnnnnnnnnnnnnnnnnnnnnnnnnnnnnnnnnnnnnnnnnnnnnnnnnnnnnnnnnnnnnnnnnnnnnnnnnnnnnnnnnnnnnnnnnnnnnnnnnnnnnnnnnnnnnnnnnnnnnnnnnnnnnnnnnnnnnnnnnnnnnnnnnnnnnnnnnnnnnnnnnnnnnnnnnnnnnnnnnnnnnnnnnnnnnnnnnnnnnnnnnnnnnnnnnnnnnnnnnnnnnnnnnnnnnnnnnnnnnnnnnnnnnnnnnnnnnnnnnnnnnnnnnnnnnnnnnnnnnnnnnnnnnnnnnnnnnnnnnnnnnnnnnnnnnnnnnnnnnnnnnnnnnnnnnnnnnnnnnnnnnnnnnnnnnnnnnnnnnnnnnnnnnnnnnnnnnnnnnnnnnnnnnnnnnnnnnnnnnnnnnnnnnnnnnnnnnnnnnnnnnnnnnnnnnnnnnnnnnnnnnnnnnnnnnnnnnnnnnnnnnnnnnnnnnnnnnnnnnnnnnnnnnnnnnnnnnnnnnnnnnnnnnnnnnnnnnnnnnnnnnnnnnnnnnnnnnnnnnnnnnnnnnnnnnnnnnnnnnnnnnnnnnnnnnnnnnnnnnnnnnnnnnnnnnnnnnnnnnnnnnnnnnnnnnnnnnnnnnnnnnnnnnnnnnnnnnnnnnnnnnnnnnnnnnnnnnnnnnnnnnnnnnnnnnnnnnnnnnnnnnnnnnnnnnnnnnnnnnnnnnnnnnnnnnnnnnnnnnnnnnnnnnnnnnnnnnnnnnnnnnnnnnnnnnnnnnnnnnnnnnnnnnnnnnnnnnnnnnnnnnnnnnnnnnnnnnnnnnnnnnnnnnnnnnnnnnnnnnnnnnnnnnnnnnnnnnnnnnnnnnnnnnnnnnnnnnnnnnnnnnnnnnnnnnnnnnnnnnnnnnnnnnnnnnnnnnnnnnnnnnnnnnnnnnnnnnnnnnnnnnnnnnnnnnnnnnnnnnnnnnnnnnnnnnnnnnnnnnnnnnnnnnnnnnnnnnnnnnnnnnnnnnnnnnnnnnnnnnnnnnnnnnnnnnnnnnnnnnnnnnnnnnnnnnnnnnnnnnnnnnnnnnnnnnnnnnnnnnnnnnnnnnnnnnnnnnnnnnnnnnnnnnnnnnnnnnnnnnnnnnnnnnnnnnnnnnnnnnnnnnnnnnnnnnnnnnnnnnnnnnnnnnnnnnnnnnnnnnnnnnnnnnnnnnnnnnnnnnnnnnnnnnnnnnnnnnnnnnnnnnnnnnnnnnnnnnnnnnnnnnnnnnnnnnnnnnnnnnnnnnnnnnnnnnnnnnnnnnnnnnnnnnnnnnnnnnnnnnnnnnnnnnnnnnnnnnnnnnnnnnnnnnnnnnnnnnnnnnnnnnnnnnnnnnnnnnnnnnnnnnnnnnnnnnnnnnnnnnnnnnnnnnnnnnnnnnnnnnnnnnnnnnnnnnnnnnnnnnnnnnnnnnnnnnnnnnnnnnnnnnnnnnnnnnnnnnnnnnnnnnnnnnnnnnnnnnnnnnnnnnnnnnnnnnnnnnnnnnnnnnnnnnnnnnnnnnnnnnnnnnnnnnnnnnnnnnnnnnnnnnnnnnnnnnnnnnnnnnnnnnnnnnnnnnnnnnnnnnnnnnnnnnnnnnnnnnnnnnnnnnnnnnnnnnnnnnnnnnnnnnnnnnnnnnnnnnnnnnnnnnnnnnnnnnnnnnnnnnnnnnnnnnnnnnnnnnnnnnnnnnnnnnnnnnnnnnnnnnnnnnnnnnnnnnnnnnnnnnnnnnnnnnnnnnnnnnnnnnnnnnnnnnnnnnnnnnnnnnnnnnnnnnnnnnnnnnnnnnnnnnnnnnnnnnnnnnnnnnnnnnnnnnnnnnnnnnnnnnnnnnnnnnnnnnnnnnnnnnnnnnnnnnnnnnnnnnnnnnnnnnnnnnnnnnnnnnnnnnnnnnnnnnnnnnnnnnnnnnnnnnnnnnnnnnnnnnnnnnnnnnnnnnnnnnnnnnnnnnnnnnnnnnnnnnnnnnnnnnnnnnnnnnnnnnnnnnnnnnnnnnnnnnnnnnnnnnnnnnnnnnnnnnnnnnnnnnnnnnnnnnnnnnnnnnnnnnnnnnnnnnnnnnnnnnnnnnnnnnnnnnnnnnnnnnnnnnnnnnnnnnnnnnnnnnnnnnnnnnnnnnnnnnnnnnnnnnnnnnnnnnnnnnnnnnnnnnnnnnnnnnnnnnnnnnnnnnnnnnnnnnnnnnnnnnnnnnnnnnnnnnnnnnnnnnnnnnnnnnnnnnnnnnnnnnnnnnnnnnnnnnnnnnnnnnnnnnnnnnnnnnnnnnnnnnnnnnnnnnnnnnnnnnnnnnnnnnnnnnnnnnnnnnnnnnnnnnnnnnnnnnnnnnnnnnnnnnnnnnnnnnnnnnnnnnnnnnnnnnnnnnnnnnnnnnnnnnnnnnnnnnnnnnnnnnnnnnnnnnnnnnnnnnnnnnnnnnnnnnnnnnnnnnnnnnnnnnnnnnnnnnnnnnnnnnnnnnnnnnnnnnnnnnnnnnnnnnnnnnnnnnnnnnnnnnnnnnnnnnnnnnnnnnnnnnnnnnnnnnnnnnnnnnnnnnnnnnnnnnnnnnnnnnnnnnnnnnnnnnnnnnnnnnnnnnnnnnnnnnnnnnnnnnnnnnnnnnnnnnnnnnnnnnnnnnnnnnnnnnnnnnnnnnnnnnnnnnnnnnnnnnnnnnnnnnnnnnnnnnnnnnnnnnnnnnnnnnnnnnnnnnnnnnnnnnnnnnnnnnnnnnnnnnnnnnnnnnnnnnnnnnnnnnnnnnnnnnnnnnnnnnnnnnnnnnnnnnnnnnnnnnnnnnnnnnnnnnnnnnnnnnnnnnnnnnnnnnnnnnnnnnnnnnnnnnnnnnnnnnnnnnnnnnnnnnnnnnnnnnnnnnnnnnnnnnnnnnnnnnnnnnnnnnnnnnnnnnnnnnnnnnnnnnnnnnnnnnnnnnnnnnnnnnnnnnnnnnnnnnnnnnnnnnnnnnnnnnnnnnnnnnnnnnnnnnnnnnnnnnnnnnnnnnnnnnnnnnnnnnnnnnnnnnnnnnnnnnnnnnnnnnnnnnnnnnnnnnnnnnnnnnnnnnnnnnnnnnnnnnnnnnnnnnnnnnnnnnnnnnnnnnnnnnnnnnnnnnnnnnnnnnnnnnnnnnnnnnnnnnnnnnnnnnnnnnnnnnnnnnnnnnnnnnnnnnnnnnnnnnnnnnnnnnnnnnnnnnnnnnnnnnnnnnnnnnnnnnnnnnnnnnnnnnnnnnnnnnnnnnnnnnnnnnnnnnnnnnnnnnnnnnnnnnnnnnnnnnnnnnnnnnnnnnnnnnnnnnnnnnnnnnnnnnnnnnnnnnnnnnnnnnnnnnnnnnnnnnnnnnnnnnnnnnnnnnnnnnnnnnnnnnnnnnnnnnnnnnnnnnnnnnnnnnnnnnnnnnnnnnnnnnnnnnnnnnnnnnnnnnnnnnnnnnnnnnnnnnnnnnnnnnnnnnnnnnnnnnnnnnnnnnnnnnnnnnnnnnnnnnnnnnnnnnnnnnnnnnnnnnnnnnnnnnnnnnnnnnnnnnnnnnnnnnnnnnnnnnnnnnnnnnnnnnnnnnnnnnnnnnnnnnnnnnnnnnnnnnnnnnnnnnnnnnnnnnnnnnnnnnnnnnnnnnnnnnnnnnnnnnnnnnnnnnnnnnnnnnnnnnnnnnnnnnnnnnnnnnnnnnnnnnnnnnnnnnnnnnnnnnnnnnnnnnnnnnnnnnnnnnnnnnnnnnnnnnnnnnnnnnnnnnnnnnnnnnnnnnnnnnnnnnnnnnnnnnnnnnnnnnnnnnnnnnnnnnnnnnnnnnnnnnnnnnnnnnnnnnnnnnnnnnnnnnnnnnnnnnnnnnnnnnnnnnnnnnnnnnnnnnnnnnnnnnnnnnnnnnnnnnnnnnnnnnnnnnnnnnnnnnnnnnnnnnnnnnnnnnnnnnnnnnnnnnnnnnnnnnnnnnnnnnnnnnnnnnnnnnnnnnnnnnnnnnnnnnnnnnnnnnnnnnnnnnnnnnnnnnnnnnnnnnnnnnnnnnnnnnnnnnnnnnnnnnnnnnnnnnnnnnnnnnnnnnnnnnnnnnnnnnnnnnnnnnnnnnnnnnnnnnnnnnnnnnnnnnnnnnnnnnnnnnnnnnnnnnnnnnnnnnnnnnnnnnnnnnnnnnnnnnnnnnnnnnnnnnnnnnnnnnnnnnnnnnnnnnnnnnnnnnnnnnnnnnnnnnnnnnnnnnnnnnnnnnnnnnnnnnnnnnnnnnnnnnnnnnnnnnnnnnnnnnnnnnnnnnnnnnnnnnnnnnnnnnnnnnnnnnnnnnnnnnnnnnnnnnnnnnnnnnnnnnnnnnnnnnnnnnnnnnnnnnnnnnnnnnnnnnnnnnnnnnnnnnnnnnnnnnnnnnnnnnnnnnnnnnnnnnnnnnnnnnnnnnnnnnnnnnnnnnnnnnnnnnnnnnnnnnnnnnnnnnnnnnnnnnnnnnnnnnnnnnnnnnnnnnnnnnnnnnnnnnnnnnnnnnnnnnnnnnnnnnnnnnnnnnnnnnnnnnnnnnnnnnnnnnnnnnnnnnnnnnnnnnnnnnnnnnnnnnnnnnnnnnnnnnnnnnnnnnnnnnnnnnnnnnnnnnnnnnnnnnnnnnnnnnnnnnnnnnnnnnnnnnnnnnnnnnnnnnnnnnnnnnnnnnnnnnnnnnnnnnnnnnnnnnnnnnnnnnnnnnnnnnnnnnnnnnnnnnnnnnnnnnnnnnnnnnnnnnnnnnnnnnnnnnnnnnnnnnnnnnnnnnnnnnnnnnnnnnnnnnnnnnnnnnnnnnnnnnnnnnnnnnnnnnnnnnnnnnnnnnnnnnnnnnnnnnnnnnnnnnnnnnnnnnnnnnnnnnnnnnnnnnnnnnnnnnnnnnnnnnnnnnnnnnnnnnnnnnnnnnnnnnnnnnnnnnnnnnnnnnnnnnnnnnnnnnnnnnnnnnnnnnnnnnnnnnnnnnnnnnnnnnnnnnnnnnnnnnnnnnnnnnnnnnnnnnnnnnnnnnnnnnnnnnnnnnnnnnnnnnnnnnnnnnnnnnnnnnnnnnnnnnnnnnnnnnnnnnnnnnnnnnnnnnnnnnnnnnnnnnnnnnnnnnnnnnnnnnnnnnnnnnnnnnnnnnnnnnnnnnnnnnnnnnnnnnnnnnnnnnnnnnnnnnnnnnnnnnnnnnnnnnnnnnnnnnnnnnnnnnnnnnnnnnnnnnnnnnnnnnnnnnnnnnnnnnnnnnnnnnnnnnnnnnnnnnnnnnnnnnnnnnnnnnnnnnnnnnnnnnnnnnnnnnnnnnnnnnnnnnnnnnnnnnnnnnnnnnnnnnnnnnnnnnnnnnnnnnnnnnnnnnnnnnnnnnnnnnnnnnnnnnnnnnnnnnnnnnnnnnnnnnnnnnnnnnnnnnnnnnnnnnnnnnnnnnnnnnnnnnnnnnnnnnnnnnnnnnnnnnnnnnnnnnnnnnnnnnnnnnnnnnnnnnnnnnnnnnnnnnnnnnnnnnnnnnnnnnnnnnnnnnnnnnnnnnnnnnnnnnnnnnnnnnnnnnnnnnnnnnnnnnnnnnnnnnnnnnnnnnnnnnnnnnnnnnnnnnnnnnnnnnnnnnnnnnnnnnnnnnnnnnnnnnnnnnnnnnnnnnnnnnnnnnnnnnnnnnnnnnnnnnnnnnnnnnnnnnnnnnnnnnnnnnnnnnnnnnnnnnnnnnnnnnnnnnnnnnnnnnnnnnnnnnnnnnnnnnnnnnnnnnnnnnnnnnnnnnnnnnnnnnnnnnnnnnnnnnnnnnnnnnnnnnnnnnnnnnnnnnnnnnnnnnnnnnnnnnnnnnnnnnnnnnnnnnnnnnnnnnnnnnnnnnnnnnnnnnnnnnnnnnnnnnnnnnnnnnnnnnnnnnnnnnnnnnnnnnnnnnnnnnnnnnnnnnnnnnnnnnnnnnnnnnnnnnnnnnnnnnnnnnnnnnnnnnnnnnnnnnnnnnnnnnnnnnnnnnnnnnnnnnnnnnnnnnnnnnnnnnnnnnnnnnnnnnnnnnnnnnnnnnnnnnnnnnnnnnnnnnnnnnnnnnnnnnnnnnnnnnnnnnnnnnnnnnnnnnnnnnnnnnnnnnnnnnnnnnnnnnnnnnnnnnnnnnnnnnnnnnnnnnnnnnnnnnnnnnnnnnnnnnnnnnnnnnnnnnnnnnnnnnnnnnnnnnnnnnnnnnnnnnnnnnnnnnnnnnnnnnnnnnnnnnnnnnnnnnnnnnnnnnnnnnnnnnnnnnnnnnnnnnnnnnnnnnnnnnnnnnnnnnnnnnnnnnnnnnnnnnnnnnnnnnnnnnnnnnnnnnnnnnnnnnnnnnnnnnnnnnnnnnnnnnnnnnnnnnnnnnnnnnnnnnnnnnnnnnnnnnnnnnnnnnnnnnnnnnnnnnnnnnnnnnnnnnnnnnnnnnnnnnnnnnnnnnnnnnnnnnnnnnnnnnnnnnnnnnnnnnnnnnnnnnnnnnnnnnnnnnnnnnnnnnnnnnnnnnnnnnnnnnnnnnnnnnnnnnnnnnnnnnnnnnnnnnnnnnnnnnnnnnnnnnnnnnnnnnnnnnnnnnnnnnnnnnnnnnnnnnnnnnnnnnnnnnnnnnnnnnnnnnnnnnnnnnnnnnnnnnnnnnnnnnnnnnnnnnnnnnnnnnnnnnnnnnnnnnnnnnnnnnnnnnnnnnnnnnnnnnnnnnnnnnnnnnnnnnnnnnnnnnnnnnnnnnnnnnnnnnnnnnnnnnnnnnnnnnnnnnnnnnnnnnnnnnnnnnnnnnnnnnnnnnnnnnnnnnnnnnnnnnnnnnnnnnnnnnnnnnnnnnnnnnnnnnnnnnnnnnnnnnnnnnnnnnnnnnnnnnnnnnnnnnnnnnnnnnnnnnnnnnnnnnnnnnnnnnnnnnnnnnnnnnnnnnnnnnnnnnnnnnnnnnnnnnnnnnnnnnnnnnnnnnnnnnnnnnnnnnnnnnnnnnnnnnnnnnnnnnnnnnnnnnnnnnnnnnnnnnnnnnnnnnnnnnnnnnnnnnnnnnnnnnnnnnnnnnnnnnnnnnnnnnnnnnnnnnnnnnnnnnnnnnnnnnnnnnnnnnnnnnnnnnnnnnnnnnnnnnnnnnnnnnnnnnnnnnnnnnnnnnnnnnnnnnnnnnnnnnnnnnnnnnnnnnnnnnnnnnnnnnnnnnnnnnnnnnnnnnnnnnnnnnnnnnnnnnnnnnnnnnnnnnnnnnnnnnnnnnnnnnnnnnnnnnnnnnnnnnnnnnnnnnnnnnnnnnnnnnnnnnnnnnnnnnnnnnnnnnnnnnnnnnnnnnnnnnnnnnnnnnnnnnnnnnnnnnnnnnnnnnnnnnnnnnnnnnnnnnnnnnnnnnnnnnnnnnnnnnnnnnnnnnnnnnnnnnnnnnnnnnnnnnnnnnnnnnnnnnnnnnnnnnnnnnnnnnnnnnnnnnnnnnnnnnnnnnnnnnnnnnnnnnnnnnnnnnnnnnnnnnnnnnnnnnnnnnnnnnnnnnnnnnnnnnnnnnnnnnnnnnnnnnnnnnnnnnnnnnnnnnnnnnnnnnnnnnnnnnnnnnnnnnnnnnnnnnnnnnnnnnnnnnnnnnnnnnnnnnnnnnnnnnnnnnnnnnnnnnnnnnnnnnnnnnnnnnnnnnnnnnnnnnnnnnnnnnnnnnnnnnnnnnnnnnnnnnnnnnnnnnnnnnnnnnnnnnnnnnnnnnnnnnnnnnnnnnnnnnnnnnnnnnnnnnnnnnnnnnnnnnnnnnnnnnnnnnnnnnnnnnnnnnnnnnnnnnnnnnnnnnnnnnnnnnnnnnnnnnnnnnnnnnnnnnnnnnnnnnnnnnnnnnnnnnnnnnnnnnnnnnnnnnnnnnnnnnnnnnnnnnnnnnnnnnnnnnnnnnnnnnnnnnnnnnnnnnnnnnnnnnnnnnnnnnnnnnnnnnnnnnnnnnnnnnnnnnnnnnnnnnnnnnnnnnnnnnnnnnnnnnnnnnnnnnnnnnnnnnnnnnnnnnnnnnnnnnnnnnnnnnnnnnnnnnnnnnnnnnnnnnnnnnnnnnnnnnnnnnnnnnnnnnnnnnnnnnnnnnnnnnnnnnnnnnnnnnnnnnnnnnnnnnnnnnnnnnnnnnnnnnnnnnnnnnnnnnnnnnnnnnnnnnnnnnnnnnnnnnnnnnnnnnnnnnnnnnnnnnnnnnnnnnnnnnnnnnnnnnnnnnnnnnnnnnnnnnnnnnnnnnnnnnnnnnnnnnnnnnnnnnnnnnnnnnnnnnnnnnnnnnnnnnnnnnnnnnnnnnnnnnnnnnnnnnnnnnnnnnnnnnnnnnnnnnnnnnnnnnnnnnnnnnnnnnnnnnnnnnnnnnnnnnnnnnnnnnnnnnnnnnnnnnnnnnnnnnnnnnnnnnnnnnnnnnnnnnnnnnnnnnnnnnnnnnnnnnnnnnnnnnnnnnnnnnnnnnnnnnnnnnnnnnnnnnnnnnnnnnnnnnnnnnnnnnnnnnnnnnnnnnnnnnnnnnnnnnnnnnnnnnnnnnnnnnnnnnnnnnnnnnnnnnnnnnnnnnnnnnnnnnnnnnnnnnnnnnnnnnnnnnnnnnnnnnnnnnnnnnnnnnnnnnnnnnnnnnnnnnnnnnnnnnnnnnnnnnnnnnnnnnnnnnnnnnnnnnnnnnnnnnnnnnnnnnnnnnnnnnnnnnnnnnnnnnnnnnnnnnnnnnnnnnnnnnnnnnnnnnnnnnnnnnnnnnnnnnnnnnnnnnnnnnnnnnnnnnnnnnnnnnnnnnnnnnnnnnnnnnnnnnnnnnnnnnnnnnnnnnnnnnnnnnnnnnnnnnnnnnnnnnnnnnnnnnnnnnnnnnnnnnnnnnnnnnnnnnnnnnnnnnnnnnnnnnnnnnnnnnnnnnnnnnnnnnnnnnnnnnnnnnnnnnnnnnnnnnnnnnnnnnnnnnnnnnnnnnnnnnnnnnnnnnnnnnnnnnnnnnnnnnnnnnnnnnnnnnnnnnnnnnnnnnnnnnnnnnnnnnnnnnnnnnnnnnnnnnnnnnnnnnnnnnnnnnnnnnnnnnnnnnnnnnnnnnnnnnnnnnnnnnnnnnnnnnnnnnnnnnnnnnnnnnnnnnnnnnnnnnnnnnnnnnnnnnnnnnnnnnnnnnnnnnnnnnnnnnnnnnnnnnnnnnnnnnnnnnnnnnnnnnnnnnnnnnnnnnnnnnnnnnnnnnnnnnnnnnnnnnnnnnnnnnnnnnnnnnnnnnnnnnnnnnnnnnnnnnnnnnnnnnnnnnnnnnnnnnnnnnnnnnnnnnnnnnnnnnnnnnnnnnnnnnnnnnnnnnnnnnnnnnnnnnnnnnnnnnnnnnnnnnnnnnnnnnnnnnnnnnnnnnnnnnnnnnnnnnnnnnnnnnnnnnnnnnnnnnnnnnnnnnnnnnnnnnnnnnnnnnnnnnnnnnnnnnnnnnnnnnnnnnnnnnnnnnnnnnnnnnnnnnnnnnnnnnnnnnnnnnnnnnnnnnnnnnnnnnnnnnnnnnnnnnnnnnnnnnnnnnnnnnnnnnnnnnnnnnnnnnnnnnnnnnnnnnnnnnnnnnnnnnnnnnnnnnnnnnnnnnnnnnnnnnnnnnnnnnnnnnnnnnnnnnnnnnnnnnnnnnnnnnnnnnnnnnnnnnnnnnnnnnnnnnnnnnnnnnnnnnnnnnnnnnnnnnnnnnnnnnnnnnnnnnnnnnnnnnnnnnnnnnnnnnnnnnnnnnnnnnnnnnnnnnnnnnnnnnnnnnnnnnnnnnnnnnnnnnnnnnnnnnnnnnnnnnnnnnnnnnnnnnnnnnnnnnnnnnnnnnnnnnnnnnnnnnnnnnnnnnnnnnnnnnnnnnnnnnnnnnnnnnnnnnnnnnnnnnnnnnnnnnnnnnnnnnnnnnnnnnnnnnnnnnnnnnnnnnnnnnnnnnnnnnnnnnnnnnnnnnnnnnnnnnnnnnnnnnnnnnnnnnnnnnnnnnnnnnnnnnnnnnnnnnnnnnnnnnnnnnnnnnnnnnnnnnnnnnnnnnnnnnnnnnnnnnnnnnnnnnnnnnnnnnnnnnnnnnnnnnnnnnnnnnnnnnnnnnnnnnnnnnnnnnnnnnnnnnnnnnnnnnnnnnnnnnnnnnnnnnnnnnnnnnnnnnnnnnnnnnnnnnnnnnnnnnnnnnnnnnnnnnnnnnnnnnnnnnnnnnnnnnnnnnnnnnnnnnnnnnnnnnnnnnnnnnnnnnnnnnnnnnnnnnnnnnnnnnnnnnnnnnnnnnnnnnnnnnnnnnnnnnnnnnnnnnnnnnnnnnnnnnnnnnnnnnnnnnnnnnnnnnnnnnnnnnnnnnnnnnnnnnnnnnnnnnnnnnnnnnnnnnnnnnnnnnnnnnnnnnnnnnnnnnnnnnnnnnnnnnnnnnnnnnnnnnnnnnnnnnnnnnnnnnnnnnnnnnnnnnnnnnnnnnnnnnnnnnnnnnnnnnnnnnnnnnnnnnnnnnnnnnnnnnnnnnnnnnnnnnnnnnnnnnnnnnnnnnnnnnnnnnnnnnnnnnnnnnnnnnnnnnnnnnnnnnnnnnnnnnnnnnnnnnnnnnnnnnnnnnnnnnnnnnnnnnnnnnnnnnnnnnnnnnnnnnnnnnnnnnnnnnnnnnnnnnnnnnnnnnnnnnnnnnnnnnnnnnnnnnnnnnnnnnnnnnnnnnnnnnnnnnnnnnnnnnnnnnnnnnnnnnnnnnnnnnnnnnnnnnnnnnnnnnnnnnnnnnnnnnnnnnnnnnnnnnnnnnnnnnnnnnnnnnnnnnnnnnnnnnnnnnnnnnnnnnnnnnnnnnnnnnnnnnnnnnnnnnnnnnnnnnnnnnnnnnnnnnnnnnnnnnnnnnnnnnnnnnnnnnnnnnnnnnnnnnnnnnnnnnnnnnnnnnnnnnnnnnnnnnnnnnnnnnnnnnnnnnnnnnnnnnnnnnnnnnnnnnnnnnnnnnnnnnnnnnnnnnnnnnnnnnnnnnnnnnnnnnnnnnnnnnnnnnnnnnnnnnnnnnnnnnnnnnnnnnnnnnnnnnnnnnnnnnnnnnnnnnnnnnnnnnnnnnnnnnnnnnnnnnnnnnnnnnnnnnnnnnnnnnnnnnnnnnnnnnnnnnnnnnnnnnnnnnnnnnnnnnnnnnnnnnnnnnnnnnnnnnnnnnnnnnnnnnnnnnnnnnnnnnnnnnnnnnnnnnnnnnnnnnnnnnnnnnnnnnnnnnnnnnnnnnnnnnnnnnnnnnnnnnnnnnnnnnnnnnnnnnnnnnnnnnnnnnnnnnnnnnnnnnnnnnnnnnnnnnnnnnnnnnnnnnnnnnnnnnnnnnnnnnnnnnnnnnnnnnnnnnnnnnnnnnnnnnnnnnnnnnnnnnnnnnnnnnnnnnnnnnnnnnnnnnnnnnnnnnnnnnnnnnnnnnnnnnnnnnnnnnnnnnnnnnnnnnnnnnnnnnnnnnnnnnnnnnnnnnnnnnnnnnnnnnnnnnnnnnnnnnnnnnnnnnnnnnnnnnnnnnnnnnnnnnnnnnnnnnnnnnnnnnnnnnnnnnnnnnnnnnnnnnnnnnnnnnnnnnnnnnnnnnnnnnnnnnnnnnnnnnnnnnnnnnnnnnnnnnnnnnnnnnnnnnnnnnnnnnnnnnnnnnnnnnnnnnnnnnnnnnnnnnnnnnnnnnnnnnnnnnnnnnnnnnnnnnnnnnnnnnnnnnnnnnnnnnnnnnnnnnnnnnnnnnnnnnnnnnnnnnnnnnnnnnnnnnnnnnnnnnnnnnnnnnnnnnnnnnnnnnnnnnnnnnnnnnnnnnnnnnnnnnnnnnnnnnnnnnnnnnnnnnnnnnnnnnnnnnnnnnnnnnnnnnnnnnnnnnnnnnnnnnnnnnnnnnnnnnnnnnnnnnnnnnnnnnnnnnnnnnnnnnnnnnnnnnnnnnnnnnnnnnnnnnnnnnnnnnnnnnnnnnnnnnnnnnnnnnnnnnnnnnnnnnnnnnnnnnnnnnnnnnnnnnnnnnnnnnnnnnnnnnnnnnnnnnnnnnnnnnnnnnnnnnnnnnnnnnnnnnnnnnnnnnnnnnnnnnnnnnnnnnnnnnnnnnnnnnnnnnnnnnnnnnnnnnnnnnnnnnnnnnnnnnnnnnnnnnnnnnnnnnnnnnnnnnnnnnnnnnnnnnnnnnnnnnnnnnnnnnnnnnnnnnnnnnnnnnnnnnnnnnnnnnnnnnnnnnnnnnnnnnnnnnnnnnnnnnnnnnnnnnnnnnnnnnnnnnnnnnnnnnnnnnnnnnnnnnnnnnnnnnnnnnnnnnnnnnnnnnnnnnnnnnnnnnnnnnnnnnnnnnnnnnnnnnnnnnnnnnnnnnnnnnnnnnnnnnnnnnnnnnnnnnnnnnnnnnnnnnnnnnnnnnnnnnnnnnnnnnnnnnnnnnnnnnnnnnnnnnnnnnnnnnnnnnnnnnnnnnnnnnnnnnnnnnnnnnnnnnnnnnnnnnnnnnnnnnnnnnnnnnnnnnnnnnnnnnnnnnnnnnnnnnnnnnnnnnnnnnnnnnnnnnnnnnnnnnnnnnnnnnnnnnnnnnnnnnnnnnnnnnnnnnnnnnnnnnnnnnnnnnnnnnnnnnnnnnnnnnnnnnnnnnnnnnnnnnnnnnnnnnnnnnnnnnnnnnnnnnnnnnnnnnnnnnnnnnnnnnnnnnnnnnnnnnnnnnnnnnnnnnnnnnnnnnnnnnnnnnnnnnnnnnnnnnnnnnnnnnnnnnnnnnnnnnnnnnnnnnnnnnnnnnnnnnnnnnnnnnnnnnnnnnnnnnnnnnnnnnnnnnnnnnnnnnnnnnnnnnnnnnnnnnnnnnnnnnnnnnnnnnnnnnnnnnnnnnnnnnnnnnnnnnnnnnnnnnnnnnnnnnnnnnnnnnnnnnnnnnnnnnnnnnnnnnnnnnnnnnnnnnnnnnnnnnnnnnnnnnnnnnnnnnnnnnnnnnnnnnnnnnnnnnnnnnnnnnnnnnnnnnnnnnnnnnnnnnnnnnnnnnnnnnnnnnnnnnnnnnnnnnnnnnnnnnnnnnnnnnnnnnnnnnnnnnnnnnnnnnnnnnnnnnnnnnnnnnnnnnnnnnnnnnnnnnnnnnnnnnnnnnnnnnnnnnnnnnnnnnnnnnnnnnnnnnnnnnnnnnnnnnnnnnnnnnnnnnnnnnnnnnnnnnnnnnnnnnnnnnnnnnnnnnnnnnnnnnnnnnnnnnnnnnnnnnnnnnnnnnnnnnnnnnnnnnnnnnnnnnnnnnnnnnnnnnnnnnnnnnnnnnnnnnnnnnnnnnnnnnnnnnnnnnnnnnnnnnnnnnnnnnnnnnnnnnnnnnnnnnnnnnnnnnnnnnnnnnnnnnnnnnnnnnnnnnnnnnnnnnnnnnnnnnnnnnnnnnnnnnnnnnnnnnnnnnnnnnnnnnnnnnnnnnnnnnnnnnnnnnnnnnnnnnnnnnnnnnnnnnnnnnnnnnnnnnnnnnnnnnnnnnnnnnnnnnnnnnnnnnnnnnnnnnnnnnnnnnnnnnnnnnnnnnnnnnnnnnnnnnnnnnnnnnnnnnnnnnnnnnnnnnnnnnnnnnnnnnnnnnnnnnnnnnnnnnnnnnnnnnnnnnnnnnnnnnnnnnnnnnnnnnnnnnnnnnnnnnnnnnnnnnnnnnnnnnnnnnnnnnnnnnnnnnnnnnnnnnnnnnnnnnnnnnnnnnnnnnnnnnnnnnnnnnnnnnnnnnnnnnnnnnnnnnnnnnnnnnnnnnnnnnnnnnnnnnnnnnnnnnnnnnnnnnnnnnnnnnnnnnnnnnnnnnnnnnnnnnnnnnnnnnnnnnnnnnnnnnnnnnnnnnnnnnnnnnnnnnnnnnnnnnnnnnnnnnnnnnnnnnnnnnnnnnnnnnnnnnnnnnnnnnnnnnnnnnnnnnnnnnnnnnnnnnnnnnnnnnnnnnnnnnnnnnnnnnnnnnnnnnnnnnnnnnnnnnnnnnnnnnnnnnnnnnnnnnnnnnnnnnnnnnnnnnnnnnnnnnnnnnnnnnnnnnnnnnnnnnnnnnnnnnnnnnnnnnnnnnnnnnnnnnnnnnnnnnnnnnnnnnnnnnnnnnnnnnnnnnnnnnnnnnnnnnnnnnnnnnnnnnnnnnnnnnnnnnnnnnnnnnnnnnnnnnnnnnnnnnnnnnnnnnnnnnnnnnnnnnnnnnnnnnnnnnnnnnnnnnnnnnnnnnnnnnnnnnnnnnnnnnnnnnnnnnnnnnnnnnnnnnnnnnnnnnnnnnnnnnnnnnnnnnnnnnnnnnnnnnnnnnnnnnnnnnnnnnnnnnnnnnnnnnnnnnnnnnnnnnnnnnnnnnnnnnnnnnnnnnnnnnnnnnnnnnnnnnnnnnnnnnnnnnnnnnnnnnnnnnnnnnnnnnnnnnnnnnnnnnnnnnnnnnnnnnnnnnnnnnnnnnnnnnnnnnnnnnnnnnnnnnnnnnnnnnnnnnnnnnnnnnnnnnnnnnnnnnnnnnnnnnnnnnnnnnnnnnnnnnnnnnnnnnnnnnnnnnnnnnnnnnnnnnnnnnnnnnnnnnnnnnnnnnnnnnnnnnnnnnnnnnnnnnnnnnnnnnnnnnnnnnnnnnnnnnnnnnnnnnnnnnnnnnnnnnnnnnnnnnnnnnnnnnnnnnnnnnnnnnnnnnnnnnnnnnnnnnnnnnnnnnnnnnnnnnnnnnnnnnnnnnnnnnnnnnnnnnnnnnnnnnnnnnnnnnnnnnnnnnnnnnnnnnnnnnnnnnnnnnnnnnnnnnnnnnnnnnnnnnnnnnnnnnnnnnnnnnnnnnnnnnnnnnnnnnnnnnnnnnnnnnnnnnnnnnnnnnnnnnnnnnnnnnnnnnnnnnnnnnnnnnnnnnnnnnnnnnnnnnnnnnnnnnnnnnnnnnnnnnnnnnnnnnnnnnnnnnnnnnnnnnnnnnnnnnnnnnnnnnnnnnnnnnnnnnnnnnnnnnnnnnnnnnnnnnnnnnnnnnnnnnnnnnnnnnnnnnnnnnnnnnnnnnnnnnnnnnnnnnnnnnnnnnnnnnnnnnnnnnnnnnnnnnnnnnnnnnnnnnnnnnnnnnnnnnnnnnnnnnnnnnnnnnnnnnnnnnnnnnnnnnnnnnnnnnnnnnnnnnnnnnnnnnnnnnnnnnnnnnnnnnnnnnnnnnnnnnnnnnnnnnnnnnnnnnnnnnnnnnnnnnnnnnnnnnnnnnnnnnnnnnnnnnnnnnnnnnnnnnnnnnnnnnnnnnnnnnnnnnnnnnnnnnnnnnnnnnnnnnnnnnnnnnnnnnnnnnnnnnnnnnnnnnnnnnnnnnnnnnnnnnnnnnnnnnnnnnnnnnnnnnnnnnnnnnnnnnnnnnnnnnnnnnnnnnnnnnnnnnnnnnnnnnnnnnnnnnnnnnnnnnnnnnnnnnnnnnnnnnnnnnnnnnnnnnnnnnnnnnnnnnnnnnnnnnnnnnnnnnnnnnnnnnnnnnnnnnnnnnnnnnnnnnnnnnnnnnnnnnnnnnnnnnnnnnnnnnnnnnnnnnnnnnnnnnnnnnnnnnnnnnnnnnnnnnnnnnnnnnnnnnnnnnnnnnnnnnnnnnnnnnnnnnnnnnnnnnnnnnnnnnnnnnnnnnnnnnnnnnnnnnnnnnnnnnnnnnnnnnnnnnnnnnnnnnnnnnnnnnnnnnnnnnnnnnnnnnnnnnnnnnnnnnnnnnnnnnnnnnnnnnnnnnnnnnnnnnnnnnnnnnnnnnnnnnnnnnnnnnnnnnnnnnnnnnnnnnnnnnnnnnnnnnnnnnnnnnnnnnnnnnnnnnnnnnnnnnnnnnnnnnnnnnnnnnnnnnnnnnnnnnnnnnnnnnnnnnnnnnnnnnnnnnnnnnnnnnnnnnnnnnnnnnnnnnnnnnnnnnnnnnnnnnnnnnnnnnnnnnnnnnnnnnnnnnnnnnnnnnnnnnnnnnnnnnnnnnnnnnnnnnnnnnnnnnnnnnnnnnnnnnnnnnnnnnnnnnnnnnnnnnnnnnnnnnnnnnnnnnnnnnnnnnnnnnnnnnnnnnnnnnnnnnnnnnnnnnnnnnnnnnnnnnnnnnnnnnnnnnnnnnnnnnnnnnnnnnnnnnnnnnnnnnnnnnnnnnnnnnnnnnnnnnnnnnnnnnnnnnnnnnnnnnnnnnnnnnnnnnnnnnnnnnnnnnnnnnnnnnnnnnnnnnnnnnnnnnnnnnnnnnnnnnnnnnnnnnnnnnnnnnnnnnnnnnnnnnnnnnnnnnnnnnnnnnnnnnnnnnnnnnnnnnnnnnnnnnnnnnnnnnnnnnnnnnnnnnnnnnnnnnnnnnnnnnnnnnnnnnnnnnnnnnnnnnnnnnnnnnnnnnnnnnnnnnnnnnnnnnnnnnnnnnnnnnnnnnnnnnnnnnnnnnnnnnnnnnnnnnnnnnnnnnnnnnnnnnnnnnnnnnnnnnnnnnnnnnnnnnnnnnnnnnnnnnnnnnnnnnnnnnnnnnnnnnnnnnnnnnnnnnnnnnnnnnnnnnnnnnnnnnnnnnnnnnnnnnnnnnnnnnnnnnnnnnnnnnnnnnnnnnnnnnnnnnnnnnnnnnnnnnnnnnnnnnnnnnnnnnnnnnnnnnnnnnnnnnnnnnnnnnnnnnnnnnnnnnnnnnnnnnnnnnnnnnnnnnnnnnnnnnnnnnnnnnnnnnnnnnnnnnnnnnnnnnnnnnnnnnnnnnnnnnnnnnnnnnnnnnnnnnnnnnnnnnnnnnnnnnnnnnnnnnnnnnnnnnnnnnnnnnnnnnnnnnnnnnnnnnnnnnnnnnnnnnnnnnnnnnnnnnnnnnnnnnnnnnnnnnnnnnnnnnnnnnnnnnnnnnnnnnnnnnnnnnnnnnnnnnnnnnnnnnnnnnnnnnnnnnnnnnnnnnnnnnnnnnnnnnnnnnnnnnnnnnnnnnnnnnnnnnnnnnnnnnnnnnnnnnnnnnnnnnnnnnnnnnnnnnnnnnnnnnnnnnnnnnnnnnnnnnnnnnnnnnnnnnnnnnnnnnnnnnnnnnnnnnnnnnnnnnnnnnnnnnnnnnnnnnnnnnnnnnnnnnnnnnnnnnnnnnnnnnnnnnnnnnnnnnnnnnnnnnnnnnnnnnnnnnnnnnnnnnnnnnnnnnnnnnnnnnnnnnnnnnnnnnnnnnnnnnnnnnnnnnnnnnnnnnnnnnnnnnnnnnnnnnnnnnnnnnnnnnnnnnnnnnnnnnnnnnnnnnnnnnnnnnnnnnnnnnnnnnnnnnnnnnnnnnnnnnnnnnnnnnnnnnnnnnnnnnnnnnnnnnnnnnnnnnnnnnnnnnnnnnnnnnnnnnnnnnnnnnnnnnnnnnnnnnnnnnnnnnnnnnnnnnnnnnnnnnnnnnnnnnnnnnnnnnnnnnnnnnnnnnnnnnnnnnnnnnnnnnnnnnnnnnnnnnnnnnnnnnnnnnnnnnnnnnnnnnnnnnnnnnnnnnnnnnnnnnnnnnnnnnnnnnnnnnnnnnnnnnnnnnnnnnnnnnnnnnnnnnnnnnnnnnnnnnnnnnnnnnnnnnnnnnnnnnnnnnnnnnnnnnnnnnnnnnnnnnnnnnnnnnnnnnnnnnnnnnnnnnnnnnnnnnnnnnnnnnnnnnnnnnnnnnnnnnnnnnnnnnnnnnnnnnnnnnnnnnnnnnnnnnnnnnnnnnnnnnnnnnnnnnnnnnnnnnnnnnnnnnnnnnnnnnnnnnnnnnnnnnnnnnnnnnnnnnnnnnnnnnnnnnnnnnnnnnnnnnnnnnnnnnnnnnnnnnnnnnnnnnnnnnnnnnnnnnnnnnnnnnnnnnnnnnnnnnnnnnnnnnnnnnnnnnnnnnnnnnnnnnnnnnnnnnnnnnnnnnnnnnnnnnnnnnnnnnnnnnnnnnnnnnnnnnnnnnnnnnnnnnnnnnnnnnnnnnnnnnnnnnnnnnnnnnnnnnnnnnnnnnnnnnnnnnnnnnnnnnnnnnnnnnnnnnnnnnnnnnnnnnnnnnnnnnnnnnnnnnnnnnnnnnnnnnnnnnnnnnnnnnnnnnnnnnnnnnnnnnnnnnnnnnnnnnnnnnnnnnnnnnnnnnnnnnnnnnnnnnnnnnnnnnnnnnnnnnnnnnnnnnnnnnnnnnnnnnnnnnnnnnnnnnnnnnnnnnnnnnnnnnnnnnnnnnnnnnnnnnnnnnnnnnnnnnnnnnnnnnnnnnnnnnnnnnnnnnnnnnnnnnnnnnnnnnnnnnnnnnnnnnnnnnnnnnnnnnnnnnnnnnnnnnnnnnnnnnnnnnnnnnnnnnnnnnnnnnnnnnnnnnnnnnnnnnnnnnnnnnnnnnnnnnnnnnnnnnnnnnnnnnnnnnnnnnnnnnnnnnnnnnnnnnnnnnnnnnnnnnnnnnnnnnnnnnnnnnnnnnnnnnnnnnnnnnnnnnnnnnnnnnnnnnnnnnnnnnnnnnnnnnnnnnnnnnnnnnnnnnnnnnnnnnnnnnnnnnnnnnnnnnnnnnnnnnnnnnnnnnnnnnnnnnnnnnnnnnnnnnnnnnnnnnnnnnnnnnnnnnnnnnnnnnnnnnnnnnnnnnnnnnnnnnnnnnnnnnnnnnnnnnnnnnnnnnnnnnnnnnnnnnnnnnnnnnnnnnnnnnnnnnnnnnnnnnnnnnnnnnnnnnnnnnnnnnnnnnnnnnnnnnnnnnnnnnnnnnnnnnnnnnnnnnnnnnnnnnnnnnnnnnnnnnnnnnnnnnnnnnnnnnnnnnnnnnnnnnnnnnnnnnnnnnnnnnnnnnnnnnnnnnnnnnnnnnnnnnnnnnnnnnnnnnnnnnnnnnnnnnnnnnnnnnnnnnnnnnnnnnnnnnnnnnnnnnnnnnnnnnnnnnnnnnnnnnnnnnnnnnnnnnnnnnnnnnnnnnnnnnnnnnnnnnnnnnnnnnnnnnnnnnnnnnnnnnnnnnnnnnnnnnnnnnnnnnnnnnnnnnnnnnnnnnnnnnnnnnnnnnnnnnnnnnnnnnnnnnnnnnnnnnnnnnnnnnnnnnnnnnnnnnnnnnnnnnnnnnnnnnnnnnnnnnnnnnnnnnnnnnnnnnnnnnnnnnnnnnnnnnnnnnnnnnnnnnnnnnnnnnnnnnnnnnnnnnnnnnnnnnnnnnnnnnnnnnnnnnnnnnnnnnnnnnnnnnnnnnnnnnnnnnnnnnnnnnnnnnnnnnnnnnnnnnnnnnnnnnnnnnnnnnnnnnnnnnnnnnnnnnnnnnnnnnnnnnnnnnnnnnnnnnnnnnnnnnnnnnnnnnnnnnnnnnnnnnnnnnnnnnnnnnnnnnnnnnnnnnnnnnnnnnnnnnnnnnnnnnnnnnnnnnnnnnnnnnnnnnnnnnnnnnnnnnnnnnnnnnnnnnnnnnnnnnnnnnnnnnnnnnnnnnnnnnnnnnnnnnnnnnnnnnnnnnnnnnnnnnnnnnnnnnnnnnnnnnnnnnnnnnnnnnnnnnnnnnnnnnnnnnnnnnnnnnnnnnnnnnnnnnnnnnnnnnnnnnnnnnnnnnnnnnnnnnnnnnnnnnnnnnnnnnnnnnnnnnnnnnnnnnnnnnnnnnnnnnnnnnnnnnnnnnnnnnnnnnnnnnnnnnnnnnnnnnnnnnnnnnnnnnnnnnnnnnnnnnnnnnnnnnnnnnnnnnnnnnnnnnnnnnnnnnnnnnnnnnnnnnnnnnnnnnnnnnnnnnnnnnnnnnnnnnnnnnnnnnnnnnnnnnnnnnnnnnnnnnnnnnnnnnnnnnnnnnnnnnnnnnnnnnnnnnnnnnnnnnnnnnnnnnnnnnnnnnnnnnnnnnnnnnnnnnnnnnnnnnnnnnnnnnnnnnnnnnnnnnnnnnnnnnnnnnnnnnnnnnnnnnnnnnnnnnnnnnnnnnnnnnnnnnnnnnnnnnnnnnnnnnnnnnnnnnnnnnnnnnnnnnnnnnnnnnnnnnnnnnnnnnnnnnnnnnnnnnnnnnnnnnnnnnnnnnnnnnnnnnnnnnnnnnnnnnnnnnnnnnnnnnnnnnnnnnnnnnnnnnnnnnnnnnnnnnnnnnnnnnnnnnnnnnnnnnnnnnnnnnnnnnnnnnnnnnnnnnnnnnnnnnnnnnnnnnnnnnnnnnnnnnnnnnnnnnnnnnnnnnnnnnnnnnnnnnnnnnnnnnnnnnnnnnnnnnnnnnnnnnnnnnnnnnnnnnnnnnnnnnnnnnnnnnnnnnnnnnnnnnnnnnnnnnnnnnnnnnnnnnnnnnnnnnnnnnnnnnnnnnnnnnnnnnnnnnnnnnnnnnnnnnnnnnnnnnnnnnnnnnnnnnnnnnnnnnnnnnnnnnnnnnnnnnnnnnnnnnnnnnnnnnnnnnnnnnnnnnnnnnnnnnnnnnnnnnnnnnnnnnnnnnnnnnnnnnnnnnnnnnnnnnnnnnnnnnnnnnnnnnnnnnnnnnnnnnnnnnnnnnnnnnnnnnnnnnnnnnnnnnnnnnnnnnnnnnnnnnnnnnnnnnnnnnnnnnnnnnnnnnnnnnnnnnnnnnnnnnnnnnnnnnnnnnnnnnnnnnnnnnnnnnnnnnnnnnnnnnnnnnnnnnnnnnnnnnnnnnnnnnnnnnnnnnnnnnnnnnnnnnnnnnnnnnnnnnnnnnnnnnnnnnnnnnnnnnnnnnnnnnnnnnnnnnnnnnnnnnnnnnnnnnnnnnnnnnnnnnnnnnnnnnnnnnnnnnnnnnnnnnnnnnnnnnnnnnnnnnnnnnnnnnnnnnnnnnnnnnnnnnnnnnnnnnnnnnnnnnnnnnnnnnnnnnnnnnnnnnnnnnnnnnnnnnnnnnnnnnnnnnnnnnnnnnnnnnnnnnnnnnnnnnnnnnnnnnnnnnnnnnnnnnnnnnnnnnnnnnnnnnnnnnnnnnnnnnnnnnnnnnnnnnnnnnnnnnnnnnnnnnnnnnnnnnnnnnnnnnnnnnnnnnnnnnnnnnnnnnnnnnnnnnnnnnnnnnnnnnnnnnnnnnnnnnnnnnnnnnnnnnnnnnnnnnnnnnnnnnnnnnnnnnnnnnnnnnnnnnnnnnnnnnnnnnnnnnnnnnnnnnnnnnnnnnnnnnnnnnnnnnnnnnnnnnnnnnnnnnnnnnnnnnnnnnnnnnnnnnnnnnnnnnnnnnnnnnnnnnnnnnnnnnnnnnnnnnnnnnnnnnnnnnnnnnnnnnnnnnnnnnnnnnnnnnnnnnnnnnnnnnnnnnnnnnnnnnnnnnnnnnnnnnnnnnnnnnnnnnnnnnnnnnnnnnnnnnnnnnnnnnnnnnnnnnnnnnnnnnnnnnnnnnnnnnnnnnnnnnnnnnnnnnnnnnnnnnnnnnnnnnnnnnnnnnnnnnnnnnnnnnnnnnnnnnnnnnnnnnnnnnnnnnnnnnnnnnnnnnnnnnnnnnnnnnnnnnnnnnnnnnnnnnnnnnnnnnnnnnnnnnnnnnnnnnnnnnnnnnnnnnnnnnnnnnnnnnnnnnnnnnnnnnnnnnnnnnnnnnnnnnnnnnnnnnnnnnnnnnnnnnnnnnnnnnnnnnnnnnnnnnnnnnnnnnnnnnnnnnnnnnnnnnnnnnnnnnnnnnnnnnnnnnnnnnnnnnnnnnnnnnnnnnnnnnnnnnnnnnnnnnnnnnnnnnnnnnnnnnnnnnnnnnnnnnnnnnnnnnnnnnnnnnnnnnnnnnnnnnnnnnnnnnnnnnnnnnnnnnnnnnnnnnnnnnnnnnnnnnnnnnnnnnnnnnnnnnnnnnnnnnnnnnnnnnnnnnnnnnnnnnnnnnnnnnnnnnnnnnnnnnnnnnnnnnnnnnnnnnnnnnnnnnnnnnnnnnnnnnnnnnnnnnnnnnnnnnnnnnnnnnnnnnnnnnnnnnnnnnnnnnnnnnnnnnnnnnnnnnnnnnnnnnnnnnnnnnnnnnnnnnnnnnnnnnnnnnnnnnnnnnnnnnnnnnnnnnnnnnnnnnnnnnnnnnnnnnnnnnnnnnnnnnnnnnnnnnnnnnnnnnnnnnnnnnnnnnnnnnnnnnnnnnnnnnnnnnnnnnnnnnnnnnnnnnnnnnnnnnnnnnnnnnnnnnnnnnnnnnnnnnnnnnnnnnnnnnnnnnnnnnnnnnnnnnnnnnnnnnnnnnnnnnnnnnnnnnnnnnnnnnnnnnnnnnnnnnnnnnnnnnnnnnnnnnnnnnnnnnnnnnnnnnnnnnnnnnnnnnnnnnnnnnnnnnnnnnnnnnnnnnnnnnnnnnnnnnnnnnnnnnnnnnnnnnnnnnnnnnnnnnnnnnnnnnnnnnnnnnnnnnnnnnnnnnnnnnnnnnnnnnnnnnnnnnnnnnnnnnnnnnnnnnnnnnnnnnnnnnnnnnnnnnnnnnnnnnnnnnnnnnnnnnnnnnnnnnnnnnnnnnnnnnnnnnnnnnnnnnnnnnnnnnnnnnnnnnnnnnnnnnnnnnnnnnnnnnnnnnnnnnnnnnnnnnnnnnnnnnnnnnnnnnnnnnnnnnnnnnnnnnnnnnnnnnnnnnnnnnnnnnnnnnnnnnnnnnnnnnnnnnnnnnnnnnnnnnnnnnnnnnnnnnnnnnnnnnnnnnnnnnnnnnnnnnnnnnnnnnnnnnnnnnnnnnnnnnnnnnnnnnnnnnnnnnnnnnnnnnnnnnnnnnnnnnnnnnnnnnnnnnnnnnnnnnnnnnnnnnnnnnnnnnnnnnnnnnnnnnnnnnnnnnnnnnnnnnnnnnnnnnnnnnnnnnnnnnnnnnnnnnnnnnnnnnnnnnnnnnnnnnnnnnnnnnnnnnnnnnnnnnnnnnnnnnnnnnnnnnnnnnnnnnnnnnnnnnnnnnnnnnnnnnnnnnnnnnnnnnnnnnnnnnnnnnnnnnnnnnnnnnnnnnnnnnnnnnnnnnnnnnnnnnnnnnnnnnnnnnnnnnnnnnnnnnnnnnnnnnnnnnnnnnnnnnnnnnnnnnnnnnnnnnnnnnnnnnnnnnnnnnnnnnnnnnnnnnnnnnnnnnnnnnnnnnnnnnnnnnnnnnnnnnnnnnnnnnnnnnnnnnnnnnnnnnnnnnnnnnnnnnnnnnnnnnnnnnnnnnnnnnnnnnnnnnnnnnnnnnnnnnnnnnnnnnnnnnnnnnnnnnnnnnnnnnnnnnnnnnnnnnnnnnnnnnnnnnnnnnnnnnnnnnnnnnnnnnnnnnnnnnnnnnnnnnnnnnnnnnnnnnnnnnnnnnnnnnnnnnnnnnnnnnnnnnnnnnnnnnnnnnnnnnnnnnnnnnnnnnnnnnnnnnnnnnnnnnnnnnnnnnnnnnnnnnnnnnnnnnnnnnnnnnnnnnnnnnnnnnnnnnnnnnnnnnnnnnnnnnnnnnnnnnnnnnnnnnnnnnnnnnnnnnnnnnnnnnnnnnnnnnnnnnnnnnnnnnnnnnnnnnnnnnnnnnnnnnnnnnnnnnnnnnnnnnnnnnnnnnnnnnnnnnnnnnnnnnnnnnnnnnnnnnnnnnnnnnnnnnnnnnnnnnnnnnnnnnnnnnnnnnnnnnnnnnnnnnnnnnnnnnnnnnnnnnnnnnnnnnnnnnnnnnnnnnnnnnnnnnnnnnnnnnnnnnnnnnnnnnnnnnnnnnnnnnnnnnnnnnnnnnnnnnnnnnnnnnnnnnnnnnnnnnnnnnnnnnnnnnnnnnnnnnnnnnnnnnnnnnnnnnnnnnnnnnnnnnnnnnnnnnnnnnnnnnnnnnnnnnnnnnnnnnnnnnnnnnnnnnnnnnnnnnnnnnnnnnnnnnnnnnnnnnnnnnnnnnnnnnnnnnnnnnnnnnnnnnnnnnnnnnnnnnnnnnnnnnnnnnnnnnnnnnnnnnnnnnnnnnnnnnnnnnnnnnnnnnnnnnnnnnnnnnnnnnnnnnnnnnnnnnnnnnnnnnnnnnnnnnnnnnnnnnnnnnnnnnnnnnnnnnnnnnnnnnnnnnnnnnnnnnnnnnnnnnnnnnnnnnnnnnnnnnnnnnnnnnnnnnnnnnnnnnnnnnnnnnnnnnnnnnnnnnnnnnnnnnnnnnnnnnnnnnnnnnnnnnnnnnnnnnnnnnnnnnnnnnnnnnnnnnnnnnnnnnnnnnnnnnnnnnnnnnnnnnnnnnnnnnnnnnnnnnnnnnnnnnnnnnnnnnnnnnnnnnnnnnnnnnnnnnnnnnnnnnnnnnnnnnnnnnnnnnnnnnnnnnnnnnnnnnnnnnnnnnnnnnnnnnnnnnnnnnnnnnnnnnnnnnnnnnnnnnnnnnnnnnnnnnnnnnnnnnnnnnnnnnnnnnnnnnnnnnnnnnnnnnnnnnnnnnnnnnnnnnnnnnnnnnnnnnnnnnnnnnnnnnnnnnnnnnnnnnnnnnnnnnnnnnnnnnnnnnnnnnnnnnnnnnnnnnnnnnnnnnnnnnnnnnnnnnnnnnnnnnnnnnnnnnnnnnnnnnnnnnnnnnnnnnnnnnnnnnnnnnnnnnnnnnnnnnnnnnnnnnnnnnnnnnnnnnnnnnnnnnnnnnnnnnnnnnnnnnnnnnnnnnnnnnnnnnnnnnnnnnnnnnnnnnnnnnnnnnnnnnnnnnnnnnnnnnnnnnnnnnnnnnnnnnnnnnnnnnnnnnnnnnnnnnnnnnnnnnnnnnnnnnnnnnnnnnnnnnnnnnnnnnnnnnnnnnnnnnnnnnnnnnnnnnnnnnnnnnnnnnnnnnnnnnnnnnnnnnnnnnnnnnnnnnnnnnnnnnnnnnnnnnnnnnnnnnnnnnnnnnnnnnnnnnnnnnnnnnnnnnnnnnnnnnnnnnnnnnnnnnnnnnnnnnnnnnnnnnnnnnnnnnnnnnnnnnnnnnnnnnnnnnnnnnnnnnnnnnnnnnnnnnnnnnnnnnnnnnnnnnnnnnnnnnnnnnnnnnnnnnnnnnnnnnnnnnnnnnnnnnnnnnnnnnnnnnnnnnnnnnnnnnnnnnnnnnnnnnnnnnnnnnnnnnnnnnnnnnnnnnnnnnnnnnnnnnnnnnnnnnnnnnnnnnnnnnnnnnnnnnnnnnnnnnnnnnnnnnnnnnnnnnnnnnnnnnnnnnnnnnnnnnnnnnnnnnnnnnnnnnnnnnnnnnnnnnnnnnnnnnnnnnnnnnnnnnnnnnnnnnnnnnnnnnnnnnnnnnnnnnnnnnnnnnnnnnnnnnnnnnnnnnnnnnnnnnnnnnnnnnnnnnnnnnnnnnnnnnnnnnnnnnnnnnnnnnnnnnnnnnnnnnnnnnnnnnnnnnnnnnnnnnnnnnnnnnnnnnnnnnnnnnnnnnnnnnnnnnnnnnnnnnnnnnnnnnnnnnnnnnnnnnnnnnnnnnnnnnnnnnnnnnnnnnnnnnnnnnnnnnnnnnnnnnnnnnnnnnnnnnnnnnnnnnnnnnnnnnnnnnnnnnnnnnnnnnnnnnnnnnnnnnnnnnnnnnnnnnnnnnnnnnnnnnnnnnnnnnnnnnnnnnnnnnnnnnnnnnnnnnnnnnnnnnnnnnnnnnnnnnnnnnnnnnnnnnnnnnnnnnnnnnnnnnnnnnnnnnnnnnnnnnnnnnnnnnnnnnnnnnnnnnnnnnnnnnnnnnnnnnnnnnnnnnnnnnnnnnnnnnnnnnnnnnnnnnnnnnnnnnnnnnnnnnnnnnnnnnnnnnnnnnnnnnnnnnnnnnnnnnnnnnnnnnnnnnnnnnnnnnnnnnnnnnnnnnnnnnnnnnnnnnnnnnnnnnnnnnnnnnnnnnnnnnnnnnnnnnnnnnnnnnnnnnnnnnnnnnnnnnnnnnnnnnnnnnnnnnnnnnnnnnnnnnnnnnnnnnnnnnnnnnnnnnnnnnnnnnnnnnnnnnnnnnnnnnnnnnnnnnnnnnnnnnnnnnnnnnnnnnnnnnnnnnnnnnnnnnnnnnnnnnnnnnnnnnnnnnnnnnnnnnnnnnnnnnnnnnnnnnnnnnnnnnnnnnnnnnnnnnnnnnnnnnnnnnnnnnnnnnnnnnnnnnnnnnnnnnnnnnnnnnnnnnnnnnnnnnnnnnnnnnnnnnnnnnnnnnnnnnnnnnnnnnnnnnnnnnnnnnnnnnnnnnnnnnnnnnnnnnnnnnnnnnnnnnnnnnnnnnnnnnnnnnnnnnnnnnnnnnnnnnnnnnnnnnnnnnnnnnnnnnnnnnnnnnnnnnnnnnnnnnnnnnnnnnnnnnnnnnnnnnnnnnnnnnnnnnnnnnnnnnnnnnnnnnnnnnnnnnnnnnnnnnnnnnnnnnnnnnnnnnnnnnnnnnnnnnnnnnnnnnnnnnnnnnnnnnnnnnnnnnnnnnnnnnnnnnnnnnnnnnnnnnnnnnnnnnnnnnnnnnnnnnnnnnnnnnnnnnnnnnnnnnnnnnnnnnnnnnnnnnnnnnnnnnnnnnnnnnnnnnnnnnnnnnnnnnnnnnnnnnnnnnnnnnnnnnnnnnnnnnnnnnnnnnnnnnnnnnnnnnnnnnnnnnnnnnnnnnnnnnnnnnnnnnnnnnnnnnnnnnnnnnnnnnnnnnnnnnnnnnnnnnnnnnnnnnnnnnnnnnnnnnnnnnnnnnnnnnnnnnnnnnnnnnnnnnnnnnnnnnnnnnnnnnnnnnnnnnnnnnnnnnnnnnnnnnnnnnnnnnnnnnnnnnnnnnnnnnnnnnnnnnnnnnnnnnnnnnnnnnnnnnnnnnnnnnnnnnnnnnnnnnnnnnnnnnnnnnnnnnnnnnnnnnnnnnnnnnnnnnnnnnnnnnnnnnnnnnnnnnnnnnnnnnnnnnnnnnnnnnnnnnnnnnnnnnnnnnnnnnnnnnnnnnnnnnnnnnnnnnnnnnnnnnnnnnnnnnnnnnnnnnnnnnnnnnnnnnnnnnnnnnnnnnnnnnnnnnnnnnnnnnnnnnnnnnnnnnnnnnnnnnnnnnnnnnnnnnnnnnnnnnnnnnnnnnnnnnnnnnnnnnnnnnnnnnnnnnnnnnnnnnnnnnnnnnnnnnnnnnnnnnnnnnnnnnnnnnnnnnnnnnnnnnnnnnnnnnnnnnnnnnnnnnnnnnnnnnnnnnnnnnnnnnnnnnnnnnnnnnnnnnnnnnnnnnnnnnnnnnnnnnnnnnnnnnnnnnnnnnnnnnnnnnnnnnnnnnnnnnnnnnnnnnnnnnnnnnnnnnnnnnnnnnnnnnnnnnnnnnnnnnnnnnnnnnnnnnnnnnnnnnnnnnnnnnnnnnnnnnnnnnnnnnnnnnnnnnnnnnnnnnnnnnnnnnnnnnnnnnnnnnnnnnnnnnnnnnnnnnnnnnnnnnnnnnnnnnnnnnnnnnnnnnnnnnnnnnnnnnnnnnnnnnnnnnnnnnnnnnnnnnnnnnnnnnnnnnnnnnnnnnnnnnnnnnnnnnnnnnnnnnnnnnnnnnnnnnnnnnnnnnnnnnnnnnnnnnnnnnnnnnnnnnnnnnnnnnnnnnnnnnnnnnnnnnnnnnnnnnnnnnnnnnnnnnnnnnnnnnnnnnnnnnnnnnnnnnnnnnnnnnnnnnnnnnnnnnnnnnnnnnnnnnnnnnnnnnnnnnnnnnnnnnnnnnnnnnnnnnnnnnnnnnnnnnnnnnnnnnnnnnnnnnnnnnnnnnnnnnnnnnnnnnnnnnnnnnnnnnnnnnnnnnnnnnnnnnnnnnnnnnnnnnnnnnnnnnnnnnnnnnnnnnnnnnnnnnnnnnnnnnnnnnnnnnnnnnnnnnnnnnnnnnnnnnnnnnnnnnnnnnnnnnnnnnnnnnnnnnnnnnnnnnnnnnnnnnnnnnnnnnnnnnnnnnnnnnnnnnnnnnnnnnnnnnnnnnnnnnnnnnnnnnnnnnnnnnnnnnnnnnnnnnnnnnnnnnnnnnnnnnnnnnnnnnnnnnnnnnnnnnnnnnnnnnnnnnnnnnnnnnnnnnnnnnnnnnnnnnnnnnnnnnnnnnnnnnnnnnnnnnnnnnnnnnnnnnnnnnnnnnnnnnnnnnnnnnnnnnnnnnnnnnnnnnnnnnnnnnnnnnnnnnnnnnnnnnnnnnnnnnnnnnnnnnnnnnnnnnnnnnnnnnnnnnnnnnnnnnnnnnnnnnnnnnnnnnnnnnnnnnnnnnnnnnnnnnnnnnnnnnnnnnnnnnnnnnnnnnnnnnnnnnnnnnnnnnnnnnnnnnnnnnnnnnnnnnnnnnnnnnnnnnnnnnnnnnnnnnnnnnnnnnnnnnnnnnnnnnnnnnnnnnnnnnnnnnnnnnnnnnnnnnnnnnnnnnnnnnnnnnnnnnnnnnnnnnnnnnnnnnnnnnnnnnnnnnnnnnnnnnnnnnnnnnnnnnnnnnnnnnnnnnnnnnnnnnnnnnnnnnnnnnnnnnnnnnnnnnnnnnnnnnnnnnnnnnnnnnnnnnnnnnnnnnnnnnnnnnnnnnnnnnnnnnnnnnnnnnnnnnnnnnnnnnnnnnnnnnnnnnnnnnnnnnnnnnnnnnnnnnnnnnnnnnnnnnnnnnnnnnnnnnnnnnnnnnnnnnnnnnnnnnnnnnnnnnnnnnnnnnnnnnnnnnnnnnnnnnnnnnnnnnnnnnnnnnnnnnnnnnnnnnnnnnnnnnnnnnnnnnnnnnnnnnnnnnnnnnnnnnnnnnnnnnnnnnnnnnnnnnnnnnnnnnnnnnnnnnnnnnnnnnnnnnnnnnnnnnnnnnnnnnnnnnnnnnnnnnnnnnnnnnnnnnnnnnnnnnnnnnnnnnnnnnnnnnnnnnnnnnnnnnnnnnnnnnnnnnnnnnnnnnnnnnnnnnnnnnnnnnnnnnnnnnnnnnnnnnnnnnnnnnnnnnnnnnnnnnnnnnnnnnnnnnnnnnnnnnnnnnnnnnnnnnnnnnnnnnnnnnnnnnnnnnnnnnnnnnnnnnnnnnnnnnnnnnnnnnnnnnnnnnnnnnnnnnnnnnnnnnnnnnnnnnnnnnnnnnnnnnnnnnnnnnnnnnnnnnnnnnnnnnnnnnnnnnnnnnnnnnnnnnnnnnnnnnnnnnnnnnnnnnnnnnnnnnnnnnnnnnnnnnnnnnnnnnnnnnnnnnnnnnnnnnnnnnnnnnnnnnnnnnnnnnnnnnnnnnnnnnnnnnnnnnnnnnnnnnnnnnnnnnnnnnnnnnnnnnnnnnnnnnnnnnnnnnnnnnnnnnnnnnnnnnnnnnnnnnnnnnnnnnnnnnnnnnnnnnnnnnnnnnnnnnnnnnnnnnnnnnnnnnnnnnnnnnnnnnnnnnnnnnnnnnnnnnnnnnnnnnnnnnnnnnnnnnnnnnnnnnnnnnnnnnnnnnnnnnnnnnnnnnnnnnnnnnnnnnnnnnnnnnnnnnnnnnnnnnnnnnnnnnnnnnnnnnnnnnnnnnnnnnnnnnnnnnnnnnnnnnnnnnnnnnnnnnnnnnnnnnnnnnnnnnnnnnnnnnnnnnnnnnnnnnnnnnnnnnnnnnnnnnnnnnnnnnnnnnnnnnnnnnnnnnnnnnnnnnnnnnnnnnnnnnnnnnnnnnnnnnnnnnnnnnnnnnnnnnnnnnnnnnnnnnnnnnnnnnnnnnnnnnnnnnnnnnnnnnnnnnnnnnnnnnnnnnnnnnnnnnnnnnnnnnnnnnnnnnnnnnnnnnnnnnnnnnnnnnnnnnnnnnnnnnnnnnnnnnnnnnnnnnnnnnnnnnnnnnnnnnnnnnnnnnnnnnnnnnnnnnnnnnnnnnnnnnnnnnnnnnnnnnnnnnnnnnnnnnnnnnnnnnnnnnnnnnnnnnnnnnnnnnnnnnnnnnnnnnnnnnnnnnnnnnnnnnnnnnnnnnnnnnnnnnnnnnnnnnnnnnnnnnnnnnnnnnnnnnnnnnnnnnnnnnnnnnnnnnnnnnnnnnnnnnnnnnnnnnnnnnnnnnnnnnnnnnnnnnnnnnnnnnnnnnnnnnnnnnnnnnnnnnnnnnnnnnnnnnnnnnnnnnnnnnnnnnnnnnnnnnnnnnnnnnnnnnnnnnnnnnnnnnnnnnnnnnnnnnnnnnnnnnnnnnnnnnnnnnnnnnnnnnnnnnnnnnnnnnnnnnnnnnnnnnnnnnnnnnnnnnnnnnnnnnnnnnnnnnnnnnnnnnnnnnnnnnnnnnnnnnnnnnnnnnnnnnnnnnnnnnnnnnnnnnnnnnnnnnnnnnnnnnnnnnnnnnnnnnnnnnnnnnnnnnnnnnnnnnnnnnnnnnnnnnnnnnnnnnnnnnnnnnnnnnnnnnnnnnnnnnnnnnnnnnnnnnnnnnnnnnnnnnnnnnnnnnnnnnnnnnnnnnnnnnnnnnnnnnnnnnnnnnnnnnnnnnnnnnnnnnnnnnnnnnnnnnnnnnnnnnnnnnnnnnnnnnnnnnnnnnnnnnnnnnnnnnnnnnnnnnnnnnnnnnnnnnnnnnnnnnnnnnnnnnnnnnnnnnnnnnnnnnnnnnnnnnnnnnnnnnnnnnnnnnnnnnnnnnnnnnnnnnnnnnnnnnnnnnnnnnnnnnnnnnnnnnnnnnnnnnnnnnnnnnnnnnnnnnnnnnnnnnnnnnnnnnnnnnnnnnnnnnnnnnnnnnnnnnnnnnnnnnnnnnnnnnnnnnnnnnnnnnnnnnnnnnnnnnnnnnnnnnnnnnnnnnnnnnnnnnnnnnnnnnnnnnnnnnnnnnnnnnnnnnnnnnnnnnnnnnnnnnnnnnnnnnnnnnnnnnnnnnnnnnnnnnnnnnnnnnnnnnnnnnnnnnnnnnnnnnnnnnnnnnnnnnnnnnnnnnnnnnnnnnnnnnnnnnnnnnnnnnnnnnnnnnnnnnnnnnnnnnnnnnnnnnnnnnnnnnnnnnnnnnnnnnnnnnnnnnnnnnnnnnnnnnnnnnnnnnnnnnnnnnnnnnnnnnnnnnnnnnnnnnnnnnnnnnnnnnnnnnnnnnnnnnnnnnnnnnnnnnnnnnnnnnnnnnnnnnnnnnnnnnnnnnnnnnnnnnnnnnnnnnnnnnnnnnnnnnnnnnnnnnnnnnnnnnnnnnnnnnnnnnnnnnnnnnnnnnnnnnnnnnnnnnnnnnnnnnnnnnnnnnnnnnnnnnnnnnnnnnnnnnnnnnnnnnnnnnnnnnnnnnnnnnnnnnnnnnnnnnnnnnnnnnnnnnnnnnnnnnnnnnnnnnnnnnnnnnnnnnnnnnnnnnnnnnnnnnnnnnnnnnnnnnnnnnnnnnnnnnnnnnnnnnnnnnnnnnnnnnnnnnnnnnnnnnnnnnnnnnnnnnnnnnnnnnnnnnnnnnnnnnnnnnnnnnnnnnnnnnnnnnnnnnnnnnnnnnnnnnnnnnnnnnnnnnnnnnnnnnnnnnnnnnnnnnnnnnnnnnnnnnnnnnnnnnnnnnnnnnnnnnnnnnnnnnnnnnnnnnnnnnnnnnnnnnnnnnnnnnnnnnnnnnnnnnnnnnnnnnnnnnnnnnnnnnnnnnnnnnnnnnnnnnnnnnnnnnnnnnnnnnnnnnnnnnnnnnnnnnnnnnnnnnnnnnnnnnnnnnnnnnnnnnnnnnnnnnnnnnnnnnnnnnnnnnnnnnnnnnnnnnnnnnnnnnnnnnnnnnnnnnnnnnnnnnnnnnnnnnnnnnnnnnnnnnnnnnnnnnnnnnnnnnnnnnnnnnnnnnnnnnnnnnnnnnnnnnnnnnnnnnnnnnnnnnnnnnnnnnnnnnnnnnnnnnnnnnnnnnnnnnnnnnnnnnnnnnnnnnnnnnnnnnnnnnnnnnnnnnnnnnnnnnnnnnnnnnnnnnnnnnnnnnnnnnnnnnnnnnnnnnnnnnnnnnnnnnnnnnnnnnnnnnnnnnnnnnnnnnnnnnnnnnnnnnnnnnnnnnnnnnnnnnnnnnnnnnnnnnnnnnnnnnnnnnnnnnnnnnnnnnnnnnnnnnnnnnnnnnnnnnnnnnnnnnnnnnnnnnnnnnnnnnnnnnnnnnnnnnnnnnnnnnnnnnnnnnnnnnnnnnnnnnnnnnnnnnnnnnnnnnnnnnnnnnnnnnnnnnnnnnnnnnnnnnnnnnnnnnnnnnnnnnnnnnnnnnnnnnnnnnnnnnnnnnnnnnnnnnnnnnnnnnnnnnnnnnnnnnnnnnnnnnnnnnnnnnnnnnnnnnnnnnnnnnnnnnnnnnnnnnnnnnnnnnnnnnnnnnnnnnnnnnnnnnnnnnnnnnnnnnnnnnnnnnnnnnnnnnnnnnnnnnnnnnnnnnnnnnnnnnnnnnnnnnnnnnnnnnnnnnnnnnnnnnnnnnnnnnnnnnnnnnnnnnnnnnnnnnnnnnnnnnnnnnnnnnnnnnnnnnnnnnnnnnnnnnnnnnnnnnnnnnnnnnnnnnnnnnnnnnnnnnnnnnnnnnnnnnnnnnnnnnnnnnnnnnnnnnnnnnnnnnnnnnnnnnnnnnnnnnnnnnnnnnnnnnnnnnnnnnnnnnnnnnnnnnnnnnnnnnnnnnnnnnnnnnnnnnnnnnnnnnnnnnnnnnnnnnnnnnnnnnnnnnnnnnnnnnnnnnnnnnnnnnnnnnnnnnnnnnnnnnnnnnnnnnnnnnnnnnnnnnnnnnnnnnnnnnnnnnnnnnnnnnnnnnnnnnnnnnnnnnnnnnnnnnnnnnnnnnnnnnnnnnnnnnnnnnnnnnnnnnnnnnnnnnnnnnnnnnnnnnnnnnnnnnnnnnnnnnnnnnnnnnnnnnnnnnnnnnnnnnnnnnnnnnnnnnnnnnnnnnnnnnnnnnnnnnnnnnnnnnnnnnnnnnnnnnnnnnnnnnnnnnnnnnnnnnnnnnnnnnnnnnnnnnnnnnnnnnnnnnnnnnnnnnnnnnnnnnnnnnnnnnnnnnnnnnnnnnnnnnnnnnnnnnnnnnnnnnnnnnnnnnnnnnnnnnnnnnnnnnnnnnnnnnnnnnnnnnnnnnnnnnnnnnnnnnnnnnnnnnnnnnnnnnnnnnnnnnnnnnnnnnnnnnnnnnnnnnnnnnnnnnnnnnnnnnnnnnnnnnnnnnnnnnnnnnnnnnnnnnnnnnnnnnnnnnnnnnnnnnnnnnnnnnnnnnnnnnnnnnnnnnnnnnnnnnnnnnnnnnnnnnnnnnnnnnnnnnnnnnnnnnnnnnnnnnnnnnnnnnnnnnnnnnnnnnnnnnnnnnnnnnnnnnnnnnnnnnnnnnnnnnnnnnnnnnnnnnnnnnnnnnnnnnnnnnnnnnnnnnnnnnnnnnnnnnnnnnnnnnnnnnnnnnnnnnnnnnnnnnnnnnnnnnnnnnnnnnnnnnnnnnnnnnnnnnnnnnnnnnnnnnnnnnnnnnnnnnnnnnnnnnnnnnnnnnnnnnnnnnnnnnnnnnnnnnnnnnnnnnnnnnnnnnnnnnnnnnnnnnnnnnnnnnnnnnnnnnnnnnnnnnnnnnnnnnnnnnnnnnnnnnnnnnnnnnnnnnnnnnnnnnnnnnnnnnnnnnnnnnnnnnnnnnnnnnnnnnnnnnnnnnnnnnnnnnnnnnnnnnnnnnnnnnnnnnnnnnnnnnnnnnnnnnnnnnnnnnnnnnnnnnnnnnnnnnnnnnnnnnnnnnnnnnnnnnnnnnnnnnnnnnnnnnnnnnnnnnnnnnnnnnnnnnnnnnnnnnnnnnnnnnnnnnnnnnnnnnnnnnnnnnnnnnnnnnnnnnnnnnnnnnnnnnnnnnnnnnnnnnnnnnnnnnnnnnnnnnnnnnnnnnnnnnnnnnnnnnnnnnnnnnnnnnnnnnnnnnnnnnnnnnnnnnnnnnnnnnnnnnnnnnnnnnnnnnnnnnnnnnnnnnnnnnnnnnnnnnnnnnnnnnnnnnnnnnnnnnnnnnnnnnnnnnnnnnnnnnnnnnnnnnnnnnnnnnnnnnnnnnnnnnnnnnnnnnnnnnnnnnnnnnnnnnnnnnnnnnnnnnnnnnnnnnnnnnnnnnnnnnnnnnnnnnnnnnnnnnnnnnnnnnnnnnnnnnnnnnnnnnnnnnnnnnnnnnnnnnnnnnnnnnnnnnnnnnnnnnnnnnnnnnnnnnnnnnnnnnnnnnnnnnnnnnnnnnnnnnnnnnnnnnnnnnnnnnnnnnnnnnnnnnnnnnnnnnnnnnnnnnnnnnnnnnnnnnnnnnnnnnnnnnnnnnnnnnnnnnnnnnnnnnnnnnnnnnnnnnnnnnnnnnnnnnnnnnnnnnnnnnnnnnnnnnnnnnnnnnnnnnnnnnnnnnnnnnnnnnnnnnnnnnnnnnnnnnnnnnnnnnnnnnnnnnnnnnnnnnnnnnnnnnnnnnnnnnnnnnnnnnnnnnnnnnnnnnnnnnnnnnnnnnnnnnnnnnnnnnnnnnnnnnnnnnnnnnnnnnnnnnnnnnnnnnnnnnnnnnnnnnnnnnnnnnnnnnnnnnnnnnnnnnnnnnnnnnnnnnnnnnnnnnnnnnnnnnnnnnnnnnnnnnnnnnnnnnnnnnnnnnnnnnnnnnnnnnnnnnnnnnnnnnnnnnnnnnnnnnnnnnnnnnnnnnnnnnnnnnnnnnnnnnnnnnnnnnnnnnnnnnnnnnnnnnnnnnnnnnnnnnnnnnnnnnnnnnnnnnnnnnnnnnnnnnnnnnnnnnnnnnnnnnnnnnnnnnnnnnnnnnnnnnnnnnnnnnnnnnnnnnnnnnnnnnnnnnnnnnnnnnnnnnnnnnnnnnnnnnnnnnnnnnnnnnnnnnnnnnnnnnnnnnnnnnnnnnnnnnnnnnnnnnnnnnnnnnnnnnnnnnnnnnnnnnnnnnnnnnnnnnnnnnnnnnnnnnnnnnnnnnnnnnnnnnnnnnnnnnnnnnnnnnnnnnnnnnnnnnnnnnnnnnnnnnnnnnnnnnnnnnnnnnnnnnnnnnnnnnnnnnnnnnnnnnnnnnnnnnnnnnnnnnnnnnnnnnnnnnnnnnnnnnnnnnnnnnnnnnnnnnnnnnnnnnnnnnnnnnnnnnnnnnnnnnnnnnnnnnnnnnnnnnnnnnnnnnnnnnnnnnnnnnnnnnnnnnnnnnnnnnnnnnnnnnnnnnnnnnnnnnnnnnnnnnnnnnnnnnnnnnnnnnnnnnnnnnnnnnnnnnnnnnnnnnnnnnnnnnnnnnnnnnnnnnnnnnnnnnnnnnnnnnnnnnnnnnnnnnnnnnnnnnnnnnnnnnnnnnnnnnnnnnnnnnnnnnnnnnnnnnnnnnnnnnnnnnnnnnnnnnnnnnnnnnnnnnnnnnnnnnnnnnnnnnnnnnnnnnnnnnnnnnnnnnnnnnnnnnnnnnnnnnnnnnnnnnnnnnnnnnnnnnnnnnnnnnnnnnnnnnnnnnnnnnnnnnnnnnnnnnnnnnnnnnnnnnnnnnnnnnnnnnnnnnnnnnnnnnnnnnnnnnnnnnnnnnnnnnnnnnnnnnnnnnnnnnnnnnnnnnnnnnnnnnnnnnnnnnnnnnnnnnnnnnnnnnnnnnnnnnnnnnnnnnnnnnnnnnnnnnnnnnnnnnnnnnnnnnnnnnnnnnnnnnnnnnnnnnnnnnnnnnnnnnnnnnnnnnnnnnnnnnnnnnnnnnnnnnnnnnnnnnnnnnnnnnnnnnnnnnnnnnnnnnnnnnnnnnnnnnnnnnnnnnnnnnnnnnnnnnnnnnnnnnnnnnnnnnnnnnnnnnnnnnnnnnnnnnnnnnnnnnnnnnnnnnnnnnnnnnnnnnnnnnnnnnnnnnnnnnnnnnnnnnnnnnnnnnnnnnnnnnnnnnnnnnnnnnnnnnnnnnnnnnnnnnnnnnnnnnnnnnnnnnnnnnnnnnnnnnnnnnnnnnnnnnnnnnnnnnnnnnnnnnnnnnnnnnnnnnnnnnnnnnnnnnnnnnnnnnnnnnnnnnnnnnnnnnnnnnnnnnnnnnnnnnnnnnnnnnnnnnnnnnnnnnnnnnnnnnnnnnnnnnnnnnnnnnnnnnnnnnnnnnnnnnnnnnnnnnnnnnnnnnnnnnnnnnnnnnnnnnnnnnnnnnnnnnnnnnnnnnnnnnnnnnnnnnnnnnnnnnnnnnnnnnnnnnnnnnnnnnnnnnnnnnnnnnnnnnnnnnnnnnnnnnnnnnnnnnnnnnnnnnnnnnnnnnnnnnnnnnnnnnnnnnnnnnnnnnnnnnnnnnnnnnnnnnnnnnnnnnnnnnnnnnnnnnnnnnnnnnnnnnnnnnnnnnnnnnnnnnnnnnnnnnnnnnnnnnnnnnnnnnnnnnnnnnnnnnnnnnnnnnnnnnnnnnnnnnnnnnnnnnnnnnnnnnnnnnnnnnnnnnnnnnnnnnnnnnnnnnnnnnnnnnnnnnnnnnnnnnnnnnnnnnnnnnnnnnnnnnnnnnnnnnnnnnnnnnnnnnnnnnnnnnnnnnnnnnnnnnnnnnnnnnnnnnnnnnnnnnnnnnnnnnnnnnnnnnnnnnnnnnnnnnnnnnnnnnnnnnnnnnnnnnnnnnnnnnnnnnnnnnnnnnnnnnnnnnnnnnnnnnnnnnnnnnnnnnnnnnnnnnnnnnnnnnnnnnnnnnnnnnnnnnnnnnnnnnnnnnnnnnnnnnnnnnnnnnnnnnnnnnnnnnnnnnnnnnnnnnnnnnnnnnnnnnnnnnnnnnnnnnnnnnnnnnnnnnnnnnnnnnnnnnnnnnnnnnnnnnnnnnnnnnnnnnnnnnnnnnnnnnnnnnnnnnnnnnnnnnnnnnnnnnnnnnnnnnnnnnnnnnnnnnnnnnnnnnnnnnnnnnnnnnnnnnnnnnnnnnnnnnnnnnnnnnnnnnnnnnnnnnnnnnnnnnnnnnnnnnnnnnnnnnnnnnnnnnnnnnnnnnnnnnnnnnnnnnnnnnnnnnnnnnnnnnnnnnnnnnnnnnnnnnnnnnnnnnnnnnnnnnnnnnnnnnnnnnnnnnnnnnnnnnnnnnnnnnnnnnnnnnnnnnnnnnnnnnnnnnnnnnnnnnnnnnnnnnnnnnnnnnnnnnnnnnnnnnnnnnnnnnnnnnnnnnnnnnnnnnnnnnnnnnnnnnnnnnnnnnnnnnnnnnnnnnnnnnnnnnnnnnnnnnnnnnnnnnnnnnnnnnnnnnnnnnnnnnnnnnnnnnnnnnnnnnnnnnnnnnnnnnnnnnnnnnnnnnnnnnnnnnnnnnnnnnnnnnnnnnnnnnnnnnnnnnnnnnnnnnnnnnnnnnnnnnnnnnnnnnnnnnnnnnnnnnnnnnnnnnnnnnnnnnnnnnnnnnnnnnnnnnnnnnnnnnnnnnnnnnnnnnnnnnnnnnnnnnnnnnnnnnnnnnnnnnnnnnnnnnnnnnnnnnnnnnnnnnnnnnnnnnnnnnnnnnnnnnnnnnnnnnnnnnnnnnnnnnnnnnnnnnnnnnnnnnnnnnnnnnnnnnnnnnnnnnnnnnnnnnnnnnnnnnnnnnnnnnnnnnnnnnnnnnnnnnnnnnnnnnnnnnnnnnnnnnnnnnnnnnnnnnnnnnnnnnnnnnnnnnnnnnnnnnnnnnnnnnnnnnnnnnnnnnnnnnnnnnnnnnnnnnnnnnnnnnnnnnnnnnnnnnnnnnnnnnnnnnnnnnnnnnnnnnnnnnnnnnnnnnnnnnnnnnnnnnnnnnnnnnnnnnnnnnnnnnnnnnnnnnnnnnnnnnnnnnnnnnnnnnnnnnnnnnnnnnnnnnnnnnnnnnnnnnnnnnnnnnnnnnnnnnnnnnnnnnnnnnnnnnnnnnnnnnnnnnnnnnnnnnnnnnnnnnnnnnnnnnnnnnnnnnnnnnnnnnnnnnnnnnnnnnnnnnnnnnnnnnnnnnnnnnnnnnnnnnnnnnnnnnnnnnnnnnnnnnnnnnnnnnnnnnnnnnnnnnnnnnnnnnnnnnnnnnnnnnnnnnnnnnnnnnnnnnnnnnnnnnnnnnnnnnnnnnnnnnnnnnnnnnnnnnnnnnnnnnnnnnnnnnnnnnnnnnnnnnnnnnnnnnnnnnnnnnnnnnnnnnnnnnnnnnnnnnnnnnnnnnnnnnnnnnnnnnnnnnnnnnnnnnnnnnnnnnnnnnnnnnnnnnnnnnnnnnnnnnnnnnnnnnnnnnnnnnnnnnnnnnnnnnnnnnnnnnnnnnnnnnnnnnnnnnnnnnnnnnnnnnnnnnnnnnnnnnnnnnnnnnnnnnnnnnnnnnnnnnnnnnnnnnnnnnnnnnnnnnnnnnnnnnnnnnnnnnnnnnnnnnnnnnnnnnnnnnnnnnnnnnnnnnnnnnnnnnnnnnnnnnnnnnnnnnnnnnnnnnnnnnnnnnnnnnnnnnnnnnnnnnnnnnnnnnnnnnnnnnnnnnnnnnnnnnnnnnnnnnnnnnnnnnnnnnnnnnnnnnnnnnnnnnnnnnnnnnnnnnnnnnnnnnnnnnnnnnnnnnnnnnnnnnnnnnnnnnnnnnnnnnnnnnnnnnnnnnnnnnnnnnnnnnnnnnnnnnnnnnnnnnnnnnnnnnnnnnnnnnnnnnnnnnnnnnnnnnnnnnnnnnnnnnnnnnnnnnnnnnnnnnnnnnnnnnnnnnnnnnnnnnnnnnnnnnnnnnnnnnnnnnnnnnnnnnnnnnnnnnnnnnnnnnnnnnnnnnnnnnnnnnnnnnnnnnnnnnnnnnnnnnnnnnnnnnnnnnnnnnnnnnnnnnnnnnnnnnnnnnnnnnnnnnnnnnnnnnnnnnnnnnnnnnnnnnnnnnnnnnnnnnnnnnnnnnnnnnnnnnnnnnnnnnnnnnnnnnnnnnnnnnnnnnnnnnnnnnnnnnnnnnnnnnnnnnnnnnnnnnnnnnnnnnnnnnnnnnnnnnnnnnnnnnnnnnnnnnnnnnnnnnnnnnnnnnnnnnnnnnnnnnnnnnnnnnnnnnnnnnnnnnnnnnnnnnnnnnnnnnnnnnnnnnnnnnnnnnnnnnnnnnnnnnnnnnnnnnnnnnnnnnnnnnnnnnnnnnnnnnnnnnnnnnnnnnnnnnnnnnnnnnnnnnnnnnnnnnnnnnnnnnnnnnnnnnnnnnnnnnnnnnnnnnnnnnnnnnnnnnnnnnnnnnnnnnnnnnnnnnnnnnnnnnnnnnnnnnnnnnnnnnnnnnnnnnnnnnnnnnnnnnnnnnnnnnnnnnnnnnnnnnnnnnnnnnnnnnnnnnnnnnnnnnnnnnnnnnnnnnnnnnnnnnnnnnnnnnnnnnnnnnnnnnnnnnnnnnnnnnnnnnnnnnnnnnnnnnnnnnnnnnnnnnnnnnnnnnnnnnnnnnnnnnnnnnnnnnnnnnnnnnnnnnnnnnnnnnnnnnnnnnnnnnnnnnnnnnnnnnnnnnnnnnnnnnnnnnnnnnnnnnnnnnnnnnnnnnnnnnnnnnnnnnnnnnnnnnnnnnnnnnnnnnnnnnnnnnnnnnnnnnnnnnnnnnnnnnnnnnnnnnnnnnnnnnnnnnnnnnnnnnnnnnnnnnnnnnnnnnnnnnnnnnnnnnnnnnnnnnnnnnnnnnnnnnnnnnnnnnnnnnnnnnnnnnnnnnnnnnnnnnnnnnnnnnnnnnnnnnnnnnnnnnnnnnnnnnnnnnnnnnnnnnnnnnnnnnnnnnnnnnnnnnnnnnnnnnnnnnnnnnnnnnnnnnnnnnnnnnnnnnnnnnnnnnnnnnnnnnnnnnnnnnnnnnnnnnnnnnnnnnnnnnnnnnnnnnnnnnnnnnnnnnnnnnnnnnnnnnnnnnnnnnnnnnnnnnnnnnnnnnnnnnnnnnnnnnnnnnnnnnnnnnnnnnnnnnnnnnnnnnnnnnnnnnnnnnnnnnnnnnnnnnnnnnnnnnnnnnnnnnnnnnnnnnnnnnnnnnnnnnnnnnnnnnnnnnnnnnnnnnnnnnnnnnnnnnnnnnnnnnnnnnnnnnnnnnnnnnnnnnnnnnnnnnnnnnnnnnnnnnnnnnnnnnnnnnnnnnnnnnnnnnnnnnnnnnnnnnnnnnnnnnnnnnnnnnnnnnnnnnnnnnnnnnnnnnnnnnnnnnnnnnnnnnnnnnnnnnnnnnnnnnnnnnnnnnnnnnnnnnnnnnnnnnnnnnnnnnnnnnnnnnnnnnnnnnnnnnnnnnnnnnnnnnnnnnnnnnnnnnnnnnnnnnnnnnnnnnnnnnnnnnnnnnnnnnnnnnnnnnnnnnnnnnnnnnnnnnnnnnnnnnnnnnnnnnnnnnnnnnnnnnnnnnnnnnnnnnnnnnnnnnnnnnnnnnnnnnnnnnnnnnnnnnnnnnnnnnnnnnnnnnnnnnnnnnnnnnnnnnnnnnnnnnnnnnnnnnnnnnnnnnnnnnnnnnnnnnnnnnnnnnnnnnnnnnnnnnnnnnnnnnnnnnnnnnnnnnnnnnnnnnnnnnnnnnnnnnnnnnnnnnnnnnnnnnnnnnnnnnnnnnnnnnnnnnnnnnnnnnnnnnnnnnnnnnnnnnnnnnnnnnnnnnnnnnnnnnnnnnnnnnnnnnnnnnnnnnnnnnnnnnnnnnnnnnnnnnnnnnnnnnnnnnnnnnnnnnnnnnnnnnnnnnnnnnnnnnnnnnnnnnnnnnnnnnnnnnnnnnnnnnnnnnnnnnnnnnnnnnnnnnnnnnnnnnnnnnnnnnnnnnnnnnnnnnnnnnnnnnnnnnnnnnnnnnnnnnnnnnnnnnnnnnnnnnnnnnnnnnnnnnnnnnnnnnnnnnnnnnnnnnnnnnnnnnnnnnnnnnnnnnnnnnnnnnnnnnnnnnnnnnnnnnnnnnnnnnnnnnnnnnnnnnnnnnnnnnnnnnnnnnnnnnnnnnnnnnnnnnnnnnnnnnnnnnnnnnnnnnnnnnnnnnnnnnnnnnnnnnnnnnnnnnnnnnnnnnnnnnnnnnnnnnnnnnnnnnnnnnnnnnnnnnnnnnnnnnnnnnnnnnnnnnnnnnnnnnnnnnnnnnnnnnnnnnnnnnnnnnnnnnnnnnnnnnnnnnnnnnnnnnnnnnnnnnnnnnnnnnnnnnnnnnnnnnnnnnnnnnnnnnnnnnnnnnnnnnnnnnnnnnnnnnnnnnnnnnnnnnnnnnnnnnnnnnnnnnnnnnnnnnnnnnnnnnnnnnnnnnnnnnnnnnnnnnnnnnnnnnnnnnnnnnnnnnnnnnnnnnnnnnnnnnnnnnnnnnnnnnnnnnnnnnnnnnnnnnnnnnnnnnnnnnnnnnnnnnnnnnnnnnnnnnnnnnnnnnnnnnnnnnnnnnnnnnnnnnnnnnnnnnnnnnnnnnnnnnnnnnnnnnnnnnnnnnnnnnnnnnnnnnnnnnnnnnnnnnnnnnnnnnnnnnnnnnnnnnnnnnnnnnnnnnnnnnnnnnnnnnnnnnnnnnnnnnnnnnnnnnnnnnnnnnnnnnnnnnnnnnnnnnnnnnnnnnnnnnnnnnnnnnnnnnnnnnnnnnnnnnnnnnnnnnnnnnnnnnnnnnnnnnnnnnnnnnnnnnnnnnnnnnnnnnnnnnnnnnnnnnnnnnnnnnnnnnnnnnnnnnnnnnnnnnnnnnnnnnnnnnnnnnnnnnnnnnnnnnnnnnnnnnnnnnnnnnnnnnnnnnnnnnnnnnnnnnnnnnnnnnnnnnnnnnnnnnnnnnnnnnnnnnnnnnnnnnnnnnnnnnnnnnnnnnnnnnnnnnnnnnnnnnnnnnnnnnnnnnnnnnnnnnnnnnnnnnnnnnnnnnnnnnnnnnnnnnnnnnnnnnnnnnnnnnnnnnnnnnnnnnnnnnnnnnnnnnnnnnnnnnnnnnnnnnnnnnnnnnnnnnnnnnnnnnnnnnnnnnnnnnnnnnnnnnnnnnnnnnnnnnnnnnnnnnnnnnnnnnnnnnnnnnnnnnnnnnnnnnnnnnnnnnnnnnnnnnnnnnnnnnnnnnnnnnnnnnnnnnnnnnnnnnnnnnnnnnnnnnnnnnnnnnnnnnnnnnnnnnnnnnnnnnnnnnnnnnnnnnnnnnnnnnnnnnnnnnnnnnnnnnnnnnnnnnnnnnnnnnnnnnnnnnnnnnnnnnnnnnnnnnnnnnnnnnnnnnnnnnnnnnnnnnnnnnnnnnnnnnnnnnnnnnnnnnnnnnnnnnnnnnnnnnnnnnnnnnnnnnnnnnnnnnnnnnnnnnnnnnnnnnnnnnnnnnnnnnnnnnnnnnnnnnnnnnnnnnnnnnnnnnnnnnnnnnnnnnnnnnnnnnnnnnnnnnnnnnnnnnnnnnnnnnnnnnnnnnnnnnnnnnnnnnnnnnnnnnnnnnnnnnnnnnnnnnnnnnnnnnnnnnnnnnnnnnnnnnnnnnnnnnnnnnnnnnnnnnnnnnnnnnnnnnnnnnnnnnnnnnnnnnnnnnnnnnnnnnnnnnnnnnnnnnnnnnnnnnnnnnnnnnnnnnnnnnnnnnnnnnnnnnnnnnnnnnnnnnnnnnnnnnnnnnnnnnnnnnnnnnnnnnnnnnnnnnnnnnnnnnnnnnnnnnnnnnnnnnnnnnnnnnnnnnnnnnnnnnnnnnnnnnnnnnnnnnnnnnnnnnnnnnnnnnnnnnnnnnnnnnnnnnnnnnnnnnnnnnnnnnnnnnnnnnnnnnnnnnnnnnnnnnnnnnnnnnnnnnnnnnnnnnnnnnnnnnnnnnnnnnnnnnnnnnnnnnnnnnnnnnnnnnnnnnnnnnnnnnnnnnnnnnnnnnnnnnnnnnnnnnnnnnnnnnnnnnnnnnnnnnnnnnnnnnnnnnnnnnnnnnnnnnnnnnnnnnnnnnnnnnnnnnnnnnnnnnnnnnnnnnnnnnnnnnnnnnnnnnnnnnnnnnnnnnnnnnnnnnnnnnnnnnnnnnnnnnnnnnnnnnnnnnnnnnnnnnnnnnnnnnnnnnnnnnnnnnnnnnnnnnnnnnnnnnnnnnnnnnnnnnnnnnnnnnnnnnnnnnnnnnnnnnnnnnnnnnnnnnnnnnnnnnnnnnnnnnnnnnnnnnnnnnnnnnnnnnnnnnnnnnnnnnnnnnnnnnnnnnnnnnnnnnnnnnnnnnnnnnnnnnnnnnnnnnnnnnnnnnnnnnnnnnnnnnnnnnnnnnnnnnnnnnnnnnnnnnnnnnnnnnnnnnnnnnnnnnnnnnnnnnnnnnnnnnnnnnnnnnnnnnnnnnnnnnnnnnnnnnnnnnnnnnnnnnnnnnnnnnnnnnnnnnnnnnnnnnnnnnnnnnnnnnnnnnnnnnnnnnnnnnnnnnnnnnnnnnnnnnnnnnnnnnnnnnnnnnnnnnnnnnnnnnnnnnnnnnnnnnnnnnnnnnnnnnnnnnnnnnnnnnnnnnnnnnnnnnnnnnnnnnnnnnnnnnnnnnnnnnnnnnnnnnnnnnnnnnnnnnnnnnnnnnnnnnnnnnnnnnnnnnnnnnnnnnnnnnnnnnnnnnnnnnnnnnnnnnnnnnnnnnnnnnnnnnnnnnnnnnnnnnnnnnnnnnnnnnnnnnnnnnnnnnnnnnnnnnnnnnnnnnnnnnnnnnnnnnnnnnnnnnnnnnnnnnnnnnnnnnnnnnnnnnnnnnnnnnnnnnnnnnnnnnnnnnnnnnnnnnnnnnnnnnnnnnnnnnnnnnnnnnnnnnnnnnnnnnnnnnnnnnnnnnnnnnnnnnnnnnnnnnnnnnnnnnnnnnnnnnnnnnnnnnnnnnnnnnnnnnnnnnnnnnnnnnnnnnnnnnnnnnnnnnnnnnnnnnnnnnnnnnnnnnnnnnnnnnnnnnnnnnnnnnnnnnnnnnnnnnnnnnnnnnnnnnnnnnnnnnnnnnnnnnnnnnnnnnnnnnnnnnnnnnnnnnnnnnnnnnnnnnnnnnnnnnnnnnnnnnnnnnnnnnnnnnnnnnnnnnnnnnnnnnnnnnnnnnnnnnnnnnnnnnnnnnnnnnnnnnnnnnnnnnnnnnnnnnnnnnnnnnnnnnnnnnnnnnnnnnnnnnnnnnnnnnnnnnnnnnnnnnnnnnnnnnnnnnnnnnnnnnnnnnnnnnnnnnnnnnnnnnnnnnnnnnnnnnnnnnnnnnnnnnnnnnnnnnnnnnnnnnnnnnnnnnnnnnnnnnnnnnnnnnnnnnnnnnnnnnnnnnnnnnnnnnnnnnnnnnnnnnnnnnnnnnnnnnnnnnnnnnnnnnnnnnnnnnnnnnnnnnnnnnnnnnnnnnnnnnnnnnnnnnnnnnnnnnnnnnnnnnnnnnnnnnnnnnnnnnnnnnnnnnnnnnnnnnnnnnnnnnnnnnnnnnnnnnnnnnnnnnnnnnnnnnnnnnnnnnnnnnnnnnnnnnnnnnnnnnnnnnnnnnnnnnnnnnnnnnnnnnnnnnnnnnnnnnnnnnnnnnnnnnnnnnnnnnnnnnnnnnnnnnnnnnnnnnnnnnnnnnnnnnnnnnnnnnnnnnnnnnnnnnnnnnnnnnnnnnnnnnnnnnnnnnnnnnnnnnnnnnnnnnnnnnnnnnnnnnnnnnnnnnnnnnnnnnnnnnnnnnnnnnnnnnnnnnnnnnnnnnnnnnnnnnnnnnnnnnnnnnnnnnnnnnnnnnnnnnnnnnnnnnnnnnnnnnnnnnnnnnnnnnnnnnnnnnnnnnnnnnnnnnnnnnnnnnnnnnnnnnnnnnnnnnnnnnnnnnnnnnnnnnnnnnnnnnnnnnnnnnnnnnnnnnnnnnnnnnnnnnnnnnnnnnnnnnnnnnnnnnnnnnnnnnnnnnnnnnnnnnnnnnnnnnnnnnnnnnnnnnnnnnnnnnnnnnnnnnnnnnnnnnnnnnnnnnnnnnnnnnnnnnnnnnnnnnnnnnnnnnnnnnnnnnnnnnnnnnnnnnnnnnnnnnnnnnnnnnnnnnnnnnnnnnnnnnnnnnnnnnnnnnnnnnnnnnnnnnnnnnnnnnnnnnnnnnnnnnnnnnnnnnnnnnnnnnnnnnnnnnnnnnnnnnnnnnnnnnnnnnnnnnnnnnnnnnnnnnnnnnnnnnnnnnnnnnnnnnnnnnnnnnnnnnnnnnnnnnnnnnnnnnnnnnnnnnnnnnnnnnnnnnnnnnnnnnnnnnnnnnnnnnnnnnnnnnnnnnnnnnnnnnnnnnnnnnnnnnnnnnnnnnnnnnnnnnnnnnnnnnnnnnnnnnnnnnnnnnnnnnnnnnnnnnnnnnnnnnnnnnnnnnnnnnnnnnnnnnnnnnnnnnnnnnnnnnnnnnnnnnnnnnnnnnnnnnnnnnnnnnnnnnnnnnnnnnnnnnnnnnnnnnnnnnnnnnnnnnnnnnnnnnnnnnnnnnnnnnnnnnnnnnnnnnnnnnnnnnnnnnnnnnnnnnnnnnnnnnnnnnnnnnnnnnnnnnnnnnnnnnnnnnnnnnnnnnnnnnnnnnnnnnnnnnnnnnnnnnnnnnnnnnnnnnnnnnnnnnnnnnnnnnnnnnnnnnnnnnnnnnnnnnnnnnnnnnnnnnnnnnnnnnnnnnnnnnnnnnnnnnnnnnnnnnnnnnnnnnnnnnnnnnnnnnnnnnnnnnnnnnnnnnnnnnnnnnnnnnnnnnnnnnnnnnnnnnnnnnnnnnnnnnnnnnnnnnnnnnnnnnnnnnnnnnnnnnnnnnnnnnnnnnnnnnnnnnnnnnnnnnnnnnnnnnnnnnnnnnnnnnnnnnnnnnnnnnnnnnnnnnnnnnnnnnnnnnnnnnnnnnnnnnnnnnnnnnnnnnnnnnnnnnnnnnnnnnnnnnnnnnnnnnnnnnnnnnnnnnnnnnnnnnnnnnnnnnnnnnnnnnnnnnnnnnnnnnnnnnnnnnnnnnnnnnnnnnnnnnnnnnnnnnnnnnnnnnnnnnnnnnnnnnnnnnnnnnnnnnnnnnnnnnnnnnnnnnnnnnnnnnnnnnnnnnnnnnnnnnnnnnnnnnnnnnnnnnnnnnnnnnnnnnnnnnnnnnnnnnnnnnnnnnnnnnnnnnnnnnnnnnnnnnnnnnnnnnnnnnnnnnnnnnnnnnnnnnnnnnnnnnnnnnnnnnnnnnnnnnnnnnnnnnnnnnnnnnnnnnnnnnnnnnnnnnnnnnnnnnnnnnnnnnnnnnnnnnnnnnnnnnnnnnnnnnnnnnnnnnnnnnnnnnnnnnnnnnnnnnnnnnnnnnnnnnnnnnnnnnnnnnnnnnnnnnnnnnnnnnnnnnnnnnnnnnnnnnnnnnnnnnnnnnnnnnnnnnnnnnnnnnnnnnnnnnnnnnnnnnnnnnnnnnnnnnnnnnnnnnnnnnnnnnnnnnnnnnnnnnnnnnnnnnnnnnnnnnnnnnnnnnnnnnnnnnnnnnnnnnnnnnnnnnnnnnnnnnnnnnnnnnnnnnnnnnnnnnnnnnnnnnnnnnnnnnnnnnnnnnnnnnnnnnnnnnnnnnnnnnnnnnnnnnnnnnnnnnnnnnnnnnnnnnnnnnnnnnnnnnnnnnnnnnnnnnnnnnnnnnnnnnnnnnnnnnnnnnnnnnnnnnnnnnnnnnnnnnnnnnnnnnnnnnnnnnnnnnnnnnnnnnnnnnnnnnnnnnnnnnnnnnnnnnnnnnnnnnnnnnnnnnnnnnnnnnnnnnnnnnnnnnnnnnnnnnnnnnnnnnnnnnnnnnnnnnnnnnnnnnnnnnnnnnnnnnnnnnnnnnnnnnnnnnnnnnnnnnnnnnnnnnnnnnnnnnnnnnnnnnnnnnnnnnnnnnnnnnnnnnnnnnnnnnnnnnnnnnnnnnnnnnnnnnnnnnnnnnnnnnnnnnnnnnnnnnnnnnnnnnnnnnnnnnnnnnnnnnnnnnnnnnnnnnnnnnnnnnnnnnnnnnnnnnnnnnnnnnnnnnnnnnnnnnnnnnnnnnnnnnnnnnnnnnnnnnnnnnnnnnnnnnnnnnnnnnnnnnnnnnnnnnnnnnnnnnnnnnnnnnnnnnnnnnnnnnnnnnnnnnnnnnnnnnnnnnnnnnnnnnnnnnnnnnnnnnnnnnnnnnnnnnnnnnnnnnnnnnnnnnnnnnnnnnnnnnnnnnnnnnnnnnnnnnnnnnnnnnnnnnnnnnnnnnnnnnnnnnnnnnnnnnnnnnnnnnnnnnnnnnnnnnnnnnnnnnnnnnnnnnnnnnnnnnnnnnnnnnnnnnnnnnnnnnnnnnnnnnnnnnnnnnnnnnnnnnnnnnnnnnnnnnnnnnnnnnnnnnnnnnnnnnnnnnnnnnnnnnnnnnnnnnnnnnnnnnnnnnnnnnnnnnnnnnnnnnnnnnnnnnnnnnnnnnnnnnnnnnnnnnnnnnnnnnnnnnnnnnnnnnnnnnnnnnnnnnnnnnnnnnnnnnnnnnnnnnnnnnnnnnnnnnnnnnnnnnnnnnnnnnnnnnnnnnnnnnnnnnnnnnnnnnnnnnnnnnnnnnnnnnnnnnnnnnnnnnnnnnnnnnnnnnnnnnnnnnnnnnnnnnnnnnnnnnnnnnnnnnnnnnnnnnnnnnnnnnnnnnnnnnnnnnnnnnnnnnnnnnnnnnnnnnnnnnnnnnnnnnnnnnnnnnnnnnnnnnnnnnnnnnnnnnnnnnnnnnnnnnnnnnnnnnnnnnnnnnnnnnnnnnnnnnnnnnnnnnnnnnnnnnnnnnnnnnnnnnnnnnnnnnnnnnnnnnnnnnnnnnnnnnnnnnnnnnnnnnnnnnnnnnnnnnnnnnnnnnnnnnnnnnnnnnnnnnnnnnnnnnnnnnnnnnnnnnnnnnnnnnnnnnnnnnnnnnnnnnnnnnnnnnnnnnnnnnnnnnnnnnnnnnnnnnnnnnnnnnnnnnnnnnnnnnnnnnnnnnnnnnnnnnnnnnnnnnnnnnnnnnnnnnnnnnnnnnnnnnnnnnnnnnnnnnnnnnnnnnnnnnnnnnnnnnnnnnnnnnnnnnnnnnnnnnnnnnnnnnnnnnnnnnnnnnnnnnnnnnnnnnnnnnnnnnnnnnnnnnnnnnnnnnnnnnnnnnnnnnnnnnnnnnnnnnnnnnnnnnnnnnnnnnnnnnnnnnnnnnnnnnnnnnnnnnnnnnnnnnnnnnnnnnnnnnnnnnnnnnnnnnnnnnnnnnnnnnnnnnnnnnnnnnnnnnnnnnnnnnnnnnnnnnnnnnnnnnnnnnnnnnnnnnnnnnnnnnnnnnnnnnnnnnnnnnnnnnnnnnnnnnnnnnnnnnnnnnnnnnnnnnnnnnnnnnnnnnnnnnnnnnnnnnnnnnnnnnnnnnnnnnnnnnnnnnnnnnnnnnnnnnnnnnnnnnnnnnnnnnnnnnnnnnnnnnnnnnnnnnnnnnnnnnnnnnnnnnnnnnnnnnnnnnnnnnnnnnnnnnnnnnnnnnnnnnnnnnnnnnnnnnnnnnnnnnnnnnnnnnnnnnnnnnnnnnnnnnnnnnnnnnnnnnnnnnnnnnnnnnnnnnnnnnnnnnnnnnnnnnnnnnnnnnnnnnnnnnnnnnnnnnnnnnnnnnnnnnnnnnnnnnnnnnnnnnnnnnnnnnnnnnnnnnnnnnnnnnnnnnnnnnnnnnnnnnnnnnnnnnnnnnnnnnnnnnnnnnnnnnnnnnnnnnnnnnnnnnnnnnnnnnnnnnnnnnnnnnnnnnnnnnnnnnnnnnnnnnnnnnnnnnnnnnnnnnnnnnnnnnnnnnnnnnnnnnnnnnnnnnnnnnnnnnnnnnnnnnnnnnnnnnnnnnnnnnnnnnnnnnnnnnnnnnnnnnnnnnnnnnnnnnnnnnnnnnnnnnnnnnnnnnnnnnnnnnnnnnnnnnnnnnnnnnnnnnnnnnnnnnnnnnnnnnnnnnnnnnnnnnnnnnnnnnnnnnnnnnnnnnnnnnnnnnnnnnnnnnnnnnnnnnnnnnnnnnnnnnnnnnnnnnnnnnnnnnnnnnnnnnnnnnnnnnnnnnnnnnnnnnnnnnnnnnnnnnnnnnnnnnnnnnnnnnnnnnnnnnnnnnnnnnnnnnnnnnnnnnnnnnnnnnnnnnnnnnnnnnnnnnnnnnnnnnnnnnnnnnnnnnnnnnnnnnnnnnnnnnnnnnnnnnnnnnnnnnnnnnnnnnnnnnnnnnnnnnnnnnnnnnnnnnnnnnnnnnnnnnnnnnnnnnnnnnnnnnnnnnnnnnnnnnnnnnnnnnnnnnnnnnnnnnnnnnnnnnnnnnnnnnnnnnnnnnnnnnnnnnnnnnnnnnnnnnnnnnnnnnnnnnnnnnnnnnnnnnnnnnnnnnnnnnnnnnnnnnnnnnnnnnnnnnnnnnnnnnnnnnnnnnnnnnnnnnnnnnnnnnnnnnnnnnnnnnnnnnnnnnnnnnnnnnnnnnnnnnnnnnnnnnnnnnnnnnnnnnnnnnnnnnnnnnnnnnnnnnnnnnnnnnnnnnnnnnnnnnnnnnnnnnnnnnnnnnnnnnnnnnnnnnnnnnnnnnnnnnnnnnnnnnnnnnnnnnnnnnnnnnnnnnnnnnnnnnnnnnnnnnnnnnnnnnnnnnnnnnnnnnnnnnnnnnnnnnnnnnnnnnnnnnnnnnnnnnnnnnnnnnnnnnnnnnnnnnnnnnnnnnnnnnnnnnnnnnnnnnnnnnnnnnnnnnnnnnnnnnnnnnnnnnnnnnnnnnnnnnnnnnnnnnnnnnnnnnnnnnnnnnnnnnnnnnnnnnnnnnnnnnnnnnnnnnnnnnnnnnnnnnnnnnnnnnnnnnnnnnnnnnnnnnnnnnnnnnnnnnnnnnnnnnnnnnnnnnnnnnnnnnnnnnnnnnnnnnnnnnnnnnnnnnnnnnnnnnnnnnnnnnnnnnnnnnnnnnnnnnnnnnnnnnnnnnnnnnnnnnnnnnnnnnnnnnnnnnnnnnnnnnnnnnnnnnnnnnnnnnnnnnnnnnnnnnnnnnnnnnnnnnnnnnnnnnnnnnnnnnnnnnnnnnnnnnnnnnnnnnnnnnnnnnnnnnnnnnnnnnnnnnnnnnnnnnnnnnnnnnnnnnnnnnnnnnnnnnnnnnnnnnnnnnnnnnnnnnnnnnnnnnnnnnnnnnnnnnnnnnnnnnnnnnnnnnnnnnnnnnnnnnnnnnnnnnnnnnnnnnnnnnnnnnnnnnnnnnnnnnnnnnnnnnnnnnnnnnnnnnnnnnnnnnnnnnnnnnnnnnnnnnnnnnnnnnnnnnnnnnnnnnnnnnnnnnnnnnnnnnnnnnnnnnnnnnnnnnnnnnnnnnnnnnnnnnnnnnnnnnnnnnnnnnnnnnnnnnnnnnnnnnnnnnnnnnnnnnnnnnnnnnnnnnnnnnnnnnnnnnnnnnnnnnnnnnnnnnnnnnnnnnnnnnnnnnnnnnnnnnnnnnnnnnnnnnnnnnnnnnnnnnnnnnnnnnnnnnnnnnnnnnnnnnnnnnnnnnnnnnnnnnnnnnnnnnnnnnnnnnnnnnnnnnnnnnnnnnnnnnnnnnnnnnnnnnnnnnnnnnnnnnnnnnnnnnnnnnnnnnnnnnnnnnnnnnnnnnnnnnnnnnnnnnnnnnnnnnnnnnnnnnnnnnnnnnnnnnnnnnnnnnnnnnnnnnnnnnnnnnnnnnnnnnnnnnnnnnnnnnnnnnnnnnnnnnnnnnnnnnnnnnnnnnnnnnnnnnnnnnnnnnnnnnnnnnnnnnnnnnnnnnnnnnnnnnnnnnnnnnnnnnnnnnnnnnnnnnnnnnnnnnnnnnnnnnnnnnnnnnnnnnnnnnnnnnnnnnnnnnnnnnnnnnnnnnnnnnnnnnnnnnnnnnnnnnnnnnnnnnnnnnnnnnnnnnnnnnnnnnnnnnnnnnnnnnnnnnnnnnnnnnnnnnnnnnnnnnnnnnnnnnnnnnnnnnnnnnnnnnnnnnnnnnnnnnnnnnnnnnnnnnnnnnnnnnnnnnnnnnnnnnnnnnnnnnnnnnnnnnnnnnnnnnnnnnnnnnnnnnnnnnnnnnnnnnnnnnnnnnnnnnnnnnnnnnnnnnnnnnnnnnnnnnnnnnnnnnnnnnnnnnnnnnnnnnnnnnnnnnnnnnnnnnnnnnnnnnnnnnnnnnnnnnnnnnnnnnnnnnnnnnnnnnnnnnnnnnnnnnnnnnnnnnnnnnnnnnnnnnnnnnnnnnnnnnnnnnnnnnnnnnnnnnnnnnnnnnnnnnnnnnnnnnnnnnnnnnnnnnnnnnnnnnnnnnnnnnnnnnnnnnnnnnnnnnnnnnnnnnnnnnnnnnnnnnnnnnnnnnnnnnnnnnnnnnnnnnnnnnnnnnnnnnnnnnnnnnnnnnnnnnnnnnnnnnnnnnnnnnnnnnnnnnnnnnnnnnnnnnnnnnnnnnnnnnnnnnnnnnnnnnnnnnnnnnnnnnnnnnnnnnnnnnnnnnnnnnnnnnnnnnnnnnnnnnnnnnnnnnnnnnnnnnnnnnnnnnnnnnnnnnnnnnnnnnnnnnnnnnnnnnnnnnnnnnnnnnnnnnnnnnnnnnnnnnnnnnnnnnnnnnnnnnnnnnnnnnnnnnnnnnnnnnnnnnnnnnnnnnnnnnnnnnnnnnnnnnnnnnnnnnnnnnnnnnnnnnnnnnnnnnnnnnnnnnnnnnnnnnnnnnnnnnnnnnnnnnnnnnnnnnnnnnnnnnnnnnnnnnnnnnnnnnnnnnnnnnnnnnnnnnnnnnnnnnnnnnnnnnnnnnnnnnnnnnnnnnnnnnnnnnnnnnnnnnnnnnnnnnnnnnnnnnnnnnnnnnnnnnnnnnnnnnnnnnnnnnnnnnnnnnnnnnnnnnnnnnnnnnnnnnnnnnnnnnnnnnnnnnnnnnnnnnnnnnnnnnnnnnnnnnnnnnnnnnnnnnnnnnnnnnnnnnnnnnnnnnnnnnnnnnnnnnnnnnnnnnnnnnnnnnnnnnnnnnnnnnnnnnnnnnnnnnnnnnnnnnnnnnnnnnnnnnnnnnnnnnnnnnnnnnnnnnnnnnnnnnnnnnnnnnnnnnnnnnnnnnnnnnnnnnnnnnnnnnnnnnnnnnnnnnnnnnnnnnnnnnnnnnnnnnnnnnnnnnnnnnnnnnnnnnnnnnnnnnnnnnnnnnnnnnnnnnnnnnnnnnnnnnnnnnnnnnnnnnnnnnnnnnnnnnnnnnnnnnnnnnnnnnnnnnnnnnnnnnnnnnnnnnnnnnnnnnnnnnnnnnnnnnnnnnnnnnnnnnnnnnnnnnnnnnnnnnnnnnnnnnnnnnnnnnnnnnnnnnnnnnnnnnnnnnnnnnnnnnnnnnnnnnnnnnnnnnnnnnnnnnnnnnnnnnnnnnnnnnnnnnnnnnnnnnnnnnnnnnnnnnnnnnnnnnnnnnnnnnnnnnnnnnnnnnnnnnnnnnnnnnnnnnnnnnnnnnnnnnnnnnnnnnnnnnnnnnnnnnnnnnnnnnnnnnnnnnnnnnnnnnnnnnnnnnnnnnnnnnnnnnnnnnnnnnnnnnnnnnnnnnnnnnnnnnnnnnnnnnnnnnnnnnnnnnnnnnnnnnnnnnnnnnnnnnnnnnnnnnnnnnnnnnnnnnnnnnnnnnnnnnnnnnnnnnnnnnnnnnnnnnnnnnnnnnnnnnnnnnnnnnnnnnnnnnnnnnnnnnnnnnnnnnnnnnnnnnnnnnnnnnnnnnnnnnnnnnnnnnnnnnnnnnnnnnnnnnnnnnnnnnnnnnnnnnnnnnnnnnnnnnnnnnnnnnnnnnnnnnnnnnnnnnnnnnnnnnnnnnnnnnnnnnnnnnnnnnnnnnnnnnnnnnnnnnnnnnnnnnnnnnnnnnnnnnnnnnnnnnnnnnnnnnnnnnnnnnnnnnnnnnnnnnnnnnnnnnnnnnnnnnnnnnnnnnnnnnnnnnnnnnnnnnnnnnnnnnnnnnnnnnnnnnnnnnnnnnnnnnnnnnnnnnnnnnnnnnnnnnnnnnnnnnnnnnnnnnnnnnnnnnnnnnnnnnnnnnnnnnnnnnnnnnnnnnnnnnnnnnnnnnnnnnnnnnnnnnnnnnnnnnnnnnnnnnnnnnnnnnnnnnnnnnnnnnnnnnnnnnnnnnnnnnnnnnnnnnnnnnnnnnnnnnnnnnnnnnnnnnnnnnnnnnnnnnnnnnnnnnnnnnnnnnnnnnnnnnnnnnnnnnnnnnnnnnnnnnnnnnnnnnnnnnnnnnnnnnnnnnnnnnnnnnnnnnnnnnnnnnnnnnnnnnnnnnnnnnnnnnnnnnnnnnnnnnnnnnnnnnnnnnnnnnnnnnnnnnnnnnnnnnnnnnnnnnnnnnnnnnnnnnnnnnnnnnnnnnnnnnnnnnnnnnnnnnnnnnnnnnnnnnnnnnnnnnnnnnnnnnnnnnnnnnnnnnnnnnnnnnnnnnnnnnnnnnnnnnnnnnnnnnnnnnnnnnnnnnnnnnnnnnnnnnnnnnnnnnnnnnnnnnnnnnnnnnnnnnnnnnnnnnnnnnnnnnnnnnnnnnnnnnnnnnnnnnnnnnnnnnnnnnnnnnnnnnnnnnnnnnnnnnnnnnnnnnnnnnnnnnnnnnnnnnnnnnnnnnnnnnnnnnnnnnnnnnnnnnnnnnnnnnnnnnnnnnnnnnnnnnnnnnnnnnnnnnnnnnnnnnnnnnnnnnnnnnnnnnnnnnnnnnnnnnnnnnnnnnnnnnnnnnnnnnnnnnnnnnnnnnnnnnnnnnnnnnnnnnnnnnnnnnnnnnnnnnnnnnnnnnnnnnnnnnnnnnnnnnnnnnnnnnnnnnnnnnnnnnnnnnnnnnnnnnnnnnnnnnnnnnnnnnnnnnnnnnnnnnnnnnnnnnnnnnnnnnnnnnnnnnnnnnnnnnnnnnnnnnnnnnnnnnnnnnnnnnnnnnnnnnnnnnnnnnnnnnnnnnnnnnnnnnnnnnnnnnnnnnnnnnnnnnnnnnnnnnnnnnnnnnnnnnnnnnnnnnnnnnnnnnnnnnnnnnnnnnnnnnnnnnnnnnnnnnnnnnnnnnnnnnnnnnnnnnnnnnnnnnnnnnnnnnnnnnnnnnnnnnnnnnnnnnnnnnnnnnnnnnnnnnnnnnnnnnnnnnnnnnnnnnnnnnnnnnnnnnnnnnnnnnnnnnnnnnnnnnnnnnnnnnnnnnnnnnnnnnnnnnnnnnnnnnnnnnnnnnnnnnnnnnnnnnnnnnnnnnnnnnnnnnnnnnnnnnnnnnnnnnnnnnnnnnnnnnnnnnnnnnnnnnnnnnnnnnnnnnnnnnnnnnnnnnnnnnnnnnnnnnnnnnnnnnnnnnnnnnnnnnnnnnnnnnnnnnnnnnnnnnnnnnnnnnnnnnnnnnnnnnnnnnnnnnnnnnnnnnnnnnnnnnnnnnnnnnnnnnnnnnnnnnnnnnnnnnnnnnnnnnnnnnnnnnnnnnnnnnnnnnnnnnnnnnnnnnnnnnnnnnnnnnnnnnnnnnnnnnnnnnnnnnnnnnnnnnnnnnnnnnnnnnnnnnnnnnnnnnnnnnnnnnnnnnnnnnnnnnnnnnnnnnnnnnnnnnnnnnnnnnnnnnnnnnnnnnnnnnnnnnnnnnnnnnnnnnnnnnnnnnnnnnnnnnnnnnnnnnnnnnnnnnnnnnnnnnnnnnnnnnnnnnnnnnnnnnnnnnnnnnnnnnnnnnnnnnnnnnnnnnnnnnnnnnnnnnnnnnnnnnnnnnnnnnnnnnnnnnnnnnnnnnnnnnnnnnnnnnnnnnnnnnnnnnnnnnnnnnnnnnnnnnnnnnnnnnnnnnnnnnnnnnnnnnnnnnnnnnnnnnnnnnnnnnnnnnnnnnnnnnnnnnnnnnnnnnnnnnnnnnnnnnnnnnnnnnnnnnnnnnnnnnnnnnnnnnnnnnnnnnnnnnnnnnnnnnnnnnnnnnnnnnnnnnnnnnnnnnnnnnnnnnnnnnnnnnnnnnnnnnnnnnnnnnnnnnnnnnnnnnnnnnnnnnnnnnnnnnnnnnnnnnnnnnnnnnnnnnnnnnnnnnnnnnnnnnnnnnnnnnnnnnnnnnnnnnnnnnnnnnnnnnnnnnnnnnnnnnnnnnnnnnnnnnnnnnnnnnnnnnnnnnnnnnnnnnnnnnnnnnnnnnnnnnnnnnnnnnnnnnnnnnnnnnnnnnnnnnnnnnnnnnnnnnnnnnnnnnnnnnnnnnnnnnnnnnnnnnnnnnnnnnnnnnnnnnnnnnnnnnnnnnnnnnnnnnnnnnnnnnnnnnnnnnnnnnnnnnnnnnnnnnnnnnnnnnnnnnnnnnnnnnnnnnnnnnnnnnnnnnnnnnnnnnnnnnnnnnnnnnnnnnnnnnnnnnnnnnnnnnnnnnnnnnnnnnnnnnnnnnnnnnnnnnnnnnnnnnnnnnnnnnnnnnnnnnnnnnnnnnnnnnnnnnnnnnnnnnnnnnnnnnnnnnnnnnnnnnnnnnnnnnnnnnnnnnnnnnnnnnnnnnnnnnnnnnnnnnnnnnnnnnnnnnnnnnnnnnnnnnnnnnnnnnnnnnnnnnnnnnnnnnnnnnnnnnnnnnnnnnnnnnnnnnnnnnnnnnnnnnnnnnnnnnnnnnnnnnnnnnnnnnnnnnnnnnnnnnnnnnnnnnnnnnnnnnnnnnnnnnnnnnnnnnnnnnnnnnnnnnnnnnnnnnnnnnnnnnnnnnnnnnnnnnnnnnnnnnnnnnnnnnnnnnnnnnnnnnnnnnnnnnnnnnnnnnnnnnnnnnnnnnnnnnnnnnnnnnnnnnnnnnnnnnnnnnnnnnnnnnnnnnnnnnnnnnnnnnnnnnnnnnnnnnnnnnnnnnnnnnnnnnnnnnnnnnnnnnnnnnnnnnnnnnnnnnnnnnnnnnnnnnnnnnnnnnnnnnnnnnnnnnnnnnnnnnnnnnnnnnnnnnnnnnnnnnnnnnnnnnnnnnnnnnnnnnnnnnnnnnnnnnnnnnnnnnnnnnnnnnnnnnnnnnnnnnnnnnnnnnnnnnnnnnnnnnnnnnnnnnnnnnnnnnnnnnnnnnnnnnnnnnnnnnnnnnnnnnnnnnnnnnnnnnnnnnnnnnnnnnnnnnnnnnnnnnnnnnnnnnnnnnnnnnnnnnnnnnnnnnnnnnnnnnnnnnnnnnnnnnnnnnnnnnnnnnnnnnnnnnnnnnnnnnnnnnnnnnnnnnnnnnnnnnnnnnnnnnnnnnnnnnnnnnnnnnnnnnnnnnnnnnnnnnnnnnnnnnnnnnnnnnnnnnnnnnnnnnnnnnnnnnnnnnnnnnnnnnnnnnnnnnnnnnnnnnnnnnnnnnnnnnnnnnnnnnnnnnnnnnnnnnnnnnnnnnnnnnnnnnnnnnnnnnnnnnnnnnnnnnnnnnnnnnnnnnnnnnnnnnnnnnnnnnnnnnnnnnnnnnnnnnnnnnnnnnnnnnnnnnnnnnnnnnnnnnnnnnnnnnnnnnnnnnnnnnnnnnnnnnnnnnnnnnnnnnnnnnnnnnnnnnnnnnnnnnnnnnnnnnnnnnnnnnnnnnnnnnnnnnnnnnnnnnnnnnnnnnnnnnnnnnnnnnnnnnnnnnnnnnnnnnnnnnnnnnnnnnnnnnnnnnnnnnnnnnnnnnnnnnnnnnnnnnnnnnnnnnnnnnnnnnnnnnnnnnnnnnnnnnnnnnnnnnnnnnnnnnnnnnnnnnnnnnnnnnnnnnnnnnnnnnnnnnnnnnnnnnnnnnnnnnnnnnnnnnnnnnnnnnnnnnnnnnnnnnnnnnnnnnnnnnnnnnnnnnnnnnnnnnnnnnnnnnnnnnnnnnnnnnnnnnnnnnnnnnnnnnnnnnnnnnnnnnnnnnnnnnnnnnnnnnnnnnnnnnnnnnnnnnnnnnnnnnnnnnnnnnnnnnnnnnnnnnnnnnnnnnnnnnnnnnnnnnnnnnnnnnnnnnnnnnnnnnnnnnnnnnnnnnnnnnnnnnnnnnnnnnnnnnnnnnnnnnnnnnnnnnnnnnnnnnnnnnnnnnnnnnnnnnnnnnnnnnnnnnnnnnnnnnnnnnnnnnnnnnnnnnnnnnnnnnnnnnnnnnnnnnnnnnnnnnnnnnnnnnnnnnnnnnnnnnnnnnnnnnnnnnnnnnnnnnnnnnnnnnnnnnnnnnnnnnnnnnnnnnnnnnnnnnnnnnnnnnnnnnnnnnnnnnnnnnnnnnnnnnnnnnnnnnnnnnnnnnnnnnnnnnnnnnnnnnnnnnnnnnnnnnnnnnnnnnnnnnnnnnnnnnnnnnnnnnnnnnnnnnnnnnnnnnnnnnnnnnnnnnnnnnnnnnnnnnnnnnnnnnnnnnnnnnnnnnnnnnnnnnnnnnnnnnnnnnnnnnnnnnnnnnnnnnnnnnnnnnnnnnnnnnnnnnnnnnnnnnnnnnnnnnnnnnnnnnnnnnnnnnnnnnnnnnnnnnnnnnnnnnnnnnnnnnnnnnnnnnnnnnnnnnnnnnnnnnnnnnnnnnnnnnnnnnnnnnnnnnnnnnnnnnnnnnnnnnnnnnnnnnnnnnnnnnnnnnnnnnnnnnnnnnnnnnnnnnnnnnnnnnnnnnnnnnnnnnnnnnnnnnnnnnnnnnnnnnnnnnnnnnnnnnnnnnnnnnnnnnnnnnnnnnnnnnnnnnnnnnnnnnnnnnnnnnnnnnnnnnnnnnnnnnnnnnnnnnnnnnnnnnnnnnnnnnnnnnnnnnnnnnnnnnnnnnnnnnnnnnnnnnnnnnnnnnnnnnnnnnnnnnnnnnnnnnnnnnnnnnnnnnnnnnnnnnnnnnnnnnnnnnnnnnnnnnnnnnnnnnnnnnnnnnnnnnnnnnnnnnnnnnnnnnnnnnnnnnnnnnnnnnnnnnnnnnnnnnnnnnnnnnnnnnnnnnnnnnnnnnnnnnnnnnnnnnnnnnnnnnnnnnnnnnnnnnnnnnnnnnnnnnnnnnnnnnnnnnnnnnnnnnnnnnnnnnnnnnnnnnnnnnnnnnnnnnnnnnnnnnnnnnnnnnnnnnnnnnnnnnnnnnnnnnnnnnnnnnnnnnnnnnnnnnnnnnnnnnnnnnnnnnnnnnnnnnnnnnnnnnnnnnnnnnnnnnnnnnnnnnnnnnnnnnnnnnnnnnnnnnnnnnnnnnnnnnnnnnnnnnnnnnnnnnnnnnnnnnnnnnnnnnnnnnnnnnnnnnnnnnnnnnnnnnnnnnnnnnnnnnnnnnnnnnnnnnnnnnnnnnnnnnnnnnnnnnnnnnnnnnnnnnnnnnnnnnnnnnnnnnnnnnnnnnnnnnnnnnnnnnnnnnnnnnnnnnnnnnnnnnnnnnnnnnnnnnnnnnnnnnnnnnnnnnnnnnnnnnnnnnnnnnnnnnnnnnnnnnnnnnnnnnnnnnnnnnnnnnnnnnnnnnnnnnnnnnnnnnnnnnnnnnnnnnnnnnnnnnnnnnnnnnnnnnnnnnnnnnnnnnnnnnnnnnnnnnnnnnnnnnnnnnnnnnnnnnnnnnnnnnnnnnnnnnnnnnnnnnnnnnnnnnnnnnnnnnnnnnnnnnnnnnnnnnnnnnnnnnnnnnnnnnnnnnnnnnnnnnnnnnnnnnnnnnnnnnnnnnnnnnnnnnnnnnnnnnnnnnnnnnnnnnnnnnnnnnnnnnnnnnnnnnnnnnnnnnnnnnnnnnnnnnnnnnnnnnnnnnnnnnnnnnnnnnnnnnnnnnnnnnnnnnnnnnnnnnnnnnnnnnnnnnnnnnnnnnnnnnnnnnnnnnnnnnnnnnnnnnnnnnnnnnnnnnnnnnnnnnnnnnnnnnnnnnnnnnnnnnnnnnnnnnnnnnnnnnnnnnnnnnnnnnnnnnnnnnnnnnnnnnnnnnnnnnnnnnnnnnnnnnnnnnnnnnnnnnnnnnnnnnnnnnnnnnnnnnnnnnnnnnnnnnnnnnnnnnnnnnnnnnnnnnnnnnnnnnnnnnnnnnnnnnnnnnnnnnnnnnnnnnnnnnnnnnnnnnnnnnnnnnnnnnnnnnnnnnnnnnnnnnnnnnnnnnnnnnnnnnnnnnnnnnnnnnnnnnnnnnnnnnnnnnnnnnnnnnnnnnnnnnnnnnnnnnnnnnnnnnnnnnnnnnnnnnnnnnnnnnnnnnnnnnnnnnnnnnnnnnnnnnnnnnnnnnnnnnnnnnnnnnnnnnnnnnnnnnnnnnnnnnnnnnnnnnnnnnnnnnnnnnnnnnnnnnnnnnnnnnnnnnnnnnnnnnnnnnnnnnnnnnnnnnnnnnnnnnnnnnnnnnnnnnnnnnnnnnnnnnnnnnnnnnnnnnnnnnnnnnnnnnnnnnnnnnnnnnnnnnnnnnnnnnnnnnnnnnnnnnnnnnnnnnnnnnnnnnnnnnnnnnnnnnnnnnnnnnnnnnnnnnnnnnnnnnnnnnnnnnnnnnnnnnnnnnnnnnnnnnnnnnnnnnnnnnnnnnnnnnnnnnnnnnnnnnnnnnnnnnnnnnnnnnnnnnnnnnnnnnnnnnnnnnnnnnnnnnnnnnnnnnnnnnnnnnnnnnnnnnnnnnnnnnnnnnnnnnnnnnnnnnnnnnnnnnnnnnnnnnnnnnnnnnnnnnnnnnnnnnnnnnnnnnnnnnnnnnnnnnnnnnnnnnnnnnnnnnnnnnnnnnnnnnnnnnnnnnnnnnnnnnnnnnnnnnnnnnnnnnnnnnnnnnnnnnnnnnnnnnnnnnnnnnnnnnnnnnnnnnnnnnnnnnnnnnnnnnnnnnnnnnnnnnnnnnnnnnnnnnnnnnnnnnnnnnnnnnnnnnnnnnnnnnnnnnnnnnnnnnnnnnnnnnnnnnnnnnnnnnnnnnnnnnnnnnnnnnnnnnnnnnnnnnnnnnnnnnnnnnnnnnnnnnnnnnnnnnnnnnnnnnnnnnnnnnnnnnnnnnnnnnnnnnnnnnnnnnnnnnnnnnnnnnnnnnnnnnnnnnnnnnnnnnnnnnnnnnnnnnnnnnnnnnnnnnnnnnnnnnnnnnnnnnnnnnnnnnnnnnnnnnnnnnnnnnnnnnnnnnnnnnnnnnnnnnnnnnnnnnnnnnnnnnnnnnnnnnnnnnnnnnnnnnnnnnnnnnnnnnnnnnnnnnnnnnnnnnnnnnnnnnnnnnnnnnnnnnnnnnnnnnnnnnnnnnnnnnnnnnnnnnnnnnnnnnnnnnnnnnnnnnnnnnnnnnnnnnnnnnnnnnnnnnnnnnnnnnnnnnnnnnnnnnnnnnnnnnnnnnnnnnnnnnnnnnnnnnnnnnnnnnnnnnnnnnnnnnnnnnnnnnnnnnnnnnnnnnnnnnnnnnnnnnnnnnnnnnnnnnnnnnnnnnnnnnnnnnnnnnnnnnnnnnnnnnnnnnnnnnnnnnnnnnnnnnnnnnnnnnnnnnnnnnnnnnnnnnnnnnnnnnnnnnnnnnnnnnnnnnnnnnnnnnnnnnnnnnnnnnnnnnnnnnnnnnnnnnnnnnnnnnnnnnnnnnnnnnnnnnnnnnnnnnnnnnnnnnnnnnnnnnnnnnnnnnnnnnnnnnnnnnnnnnnnnnnnnnnnnnnnnnnnnnnnnnnnnnnnnnnnnnnnnnnnnnnnnnnnnnnnnnnnnnnnnnnnnnnnnnnnnnnnnnnnnnnnnnnnnnnnnnnnnnnnnnnnnnnnnnnnnnnnnnnnnnnnnnnnnnnnnnnnnnnnnnnnnnnnnnnnnnnnnnnnnnnnnnnnnnnnnnnnnnnnnnnnnnnnnnnnnnnnnnnnnnnnnnnnnnnnnnnnnnnnnnnnnnnnnnnnnnnnnnnnnnnnnnnnnnnnnnnnnnnnnnnnnnnnnnnnnnnnnnnnnnnnnnnnnnnnnnnnnnnnnnnnnnnnnnnnnnnnnnnnnnnnnnnnnnnnnnnnnnnnnnnnnnnnnnnnnnnnnnnnnnnnnnnnnnnnnnnnnnnnnnnnnnnnnnnnnnnnnnnnnnnnnnnnnnnnnnnnnnnnnnnnnnnnnnnnnnnnnnnnnnnnnnnnnnnnnnnnnnnnnnnnnnnnnnnnnnnnnnnnnnnnnnnnnnnnnnnnnnnnnnnnnnnnnnnnnnnnnnnnnnnnnnnnnnnnnnnnnnnnnnnnnnnnnnnnnnnnnnnnnnnnnnnnnnnnnnnnnnnnnnnnnnnnnnnnnnnnnnnnnnnnnnnnnnnnnnnnnnnnnnnnnnnnnnnnnnnnnnnnnnnnnnnnnnnnnnnnnnnnnnnnnnnnnnnnnnnnnnnnnnnnnnnnnnnnnnnnnnnnnnnnnnnnnnnnnnnnnnnnnnnnnnnnnnnnnnnnnnnnnnnnnnnnnnnnnnnnnnnnnnnnnnnnnnnnnnnnnnnnnnnnnnnnnnnnnnnnnnnnnnnnnnnnnnnnnnnnnnnnnnnnnnnnnnnnnnnnnnnnnnnnnnnnnnnnnnnnnnnnnnnnnnnnnnnnnnnnnnnnnnnnnnnnnnnnnnnnnnnnnnnnnnnnnnnnnnnnnnnnnnnnnnnnnnnnnnnnnnnnnnnnnnnnnnnnnnnnnnnnnnnnnnnnnnnnnnnnnnnnnnnnnnnnnnnnnnnnnnnnnnnnnnnnnnnnnnnnnnnnnnnnnnnnnnnnnnnnnnnnnnnnnnnnnnnnnnnnnnnnnnnnnnnnnnnnnnnnnnnnnnnnnnnnnnnnnnnnnnnnnnnnnnnnnnnnnnnnnnnnnnnnnnnnnnnnnnnnnnnnnnnnnnnnnnnnnnnnnnnnnnnnnnnnnnnnnnnnnnnnnnnnnnnnnnnnnnnnnnnnnnnnnnnnnnnnnnnnnnnnnnnnnnnnnnnnnnnnnnnnnnnnnnnnnnnnnnnnnnnnnnnnnnnnnnnnnnnnnnnnnnnnnnnnnnnnnnnnnnnnnnnnnnnnnnnnnnnnnnnnnnnnnnnnnnnnnnnnnnnnnnnnnnnnnnnnnnnnnnnnnnnnnnnnnnnnnnnnnnnnnnnnnnnnnnnnnnnnnnnnnnnnnnnnnnnnnnnnnnnnnnnnnnnnnnnnnnnnnnnnnnnnnnnnnnnnnnnnnnnnnnnnnnnnnnnnnnnnnnnnnnnnnnnnnnnnnnnnnnnnnnnnnnnnnnnnnnnnnnnnnnnnnnnnnnnnnnnnnnnnnnnnnnnnnnnnnnnnnnnnnnnnnnnnnnnnnnnnnnnnnnnnnnnnnnnnnnnnnnnnnnnnnnnnnnnnnnnnnnnnnnnnnnnnnnnnnnnnnnnnnnnnnnnnnnnnnnnnnnnnnnnnnnnnnnnnnnnnnnnnnnnnnnnnnnnnnnnnnnnnnnnnnnnnnnnnnnnnnnnnnnnnnnnnnnnnnnnnnnnnnnnnnnnnnnnnnnnnnnnnnnnnnnnnnnnnnnnnnnnnnnnnnnnnnnnnnnnnnnnnnnnnnnnnnnnnnnnnnnnnnnnnnnnnnnnnnnnnnnnnnnnnnnnnnnnnnnnnnnnnnnnnnnnnnnnnnnnnnnnnnnnnnnnnnnnnnnnnnnnnnnnnnnnnnnnnnnnnnnnnnnnnnnnnnnnnnnnnnnnnnnnnnnnnnnnnnnnnnnnnnnnnnnnnnnnnnnnnnnnnnnnnnnnnnnnnnnnnnnnnnnnnnnnnnnnnnnnnnnnnnnnnnnnnnnnnnnnnnnnnnnnnnnnnnnnnnnnnnnnnnnnnnnnnnnnnnnnnnnnnnnnnnnnnnnnnnnnnnnnnnnnnnnnnnnnnnnnnnnnnnnnnnnnnnnnnnnnnnnnnnnnnnnnnnnnnnnnnnnnnnnnnnnnnnnnnnnnnnnnnnnnnnnnnnnnnnnnnnnnnnnnnnnnnnnnnnnnnnnnnnnnnnnnnnnnnnnnnnnnnnnnnnnnnnnnnnnnnnnnnnnnnnnnnnnnnnnnnnnnnnnnnnnnnnnnnnnnnnnnnnnnnnnnnnnnnnnnnnnnnnnnnnnnnnnnnnnnnnnnnnnnnnnnnnnnnnnnnnnnnnnnnnnnnnnnnnnnnnnnnnnnnnnnnnnnnnnnnnnnnnnnnnnnnnnnnnnnnnnnnnnnnnnnnnnnnnnnnnnnnnnnnnnnnnnnnnnnnnnnnnnnnnnnnnnnnnnnnnnnnnnnnnnnnnnnnnnnnnnnnnnnnnnnnnnnnnnnnnnnnnnnnnnnnnnnnnnnnnnnnnnnnnnnnnnnnnnnnnnnnnnnnnnnnnnnnnnnnnnnnnnnnnnnnnnnnnnnnnnnnnnnnnnnnnnnnnnnnnnnnnnnnnnnnnnnnnnnnnnnnnnnnnnnnnnnnnnnnnnnnnnnnnnnnnnnnnnnnnnnnnnnnnnnnnnnnnnnnnnnnnnnnnnnnnnnnnnnnnnnnnnnnnnnnnnnnnnnnnnnnnnnnnnnnnnnnnnnnnnnnnnnnnnnnnnnnnnnnnnnnnnnnnnnnnnnnnnnnnnnnnnnnnnnnnnnnnnnnnnnnnnnnnnnnnnnnnnnnnnnnnnnnnnnnnnnnnnnnnnnnnnnnnnnnnnnnnnnnnnnnnnnnnnnnnnnnnnnnnnnnnnnnnnnnnnnnnnnnnnnnnnnnnnnnnnnnnnnnnnnnnnnnnnnnnnnnnnnnnnnnnnnnnnnnnnnnnnnnnnnnnnnnnnnnnnnnnnnnnnnnnnnnnnnnnnnnnnnnnnnnnnnnnnnnnnnnnnnnnnnnnnnnnnnnnnnnnnnnnnnnnnnnnnnnnnnnnnnnnnnnnnnnnnnnnnnnnnnnnnnnnnnnnnnnnnnnnnnnnnnnnnnnnnnnnnnnnnnnnnnnnnnnnnnnnnnnnnnnnnnnnnnnnnnnnnnnnnnnnnnnnnnnnnnnnnnnnnnnnnnnnnnnnnnnnnnnnnnnnnnnnnnnnnnnnnnnnnnnnnnnnnnnnnnnnnnnnnnnnnnnnnnnnnnnnnnnnnnnnnnnnnnnnnnnnnnnnnnnnnnnnnnnnnnnnnnnnnnnnnnnnnnnnnnnnnnnnnnnnnnnnnnnnnnnnnnnnnnnnnnnnnnnnnnnnnnnnnnnnnnnnnnnnnnnnnnnnnnnnnnnnnnnnnnnnnnnnnnnnnnnnnnnnnnnnnnnnnnnnnnnnnnnnnnnnnnnnnnnnnnnnnnnnnnnnnnnnnnnnnnnnnnnnnnnnnnnnnnnnnnnnnnnnnnnnnnnnnnnnnnnnnnnnnnnnnnnnnnnnnnnnnnnnnnnnnnnnnnnnnnnnnnnnnnnnnnnnnnnnnnnnnnnnnnnnnnnnnnnnnnnnnnnnnnnnnnnnnnnnnnnnnnnnnnnnnnnnnnnnnnnnnnnnnnnnnnnnnnnnnnnnnnnnnnnnnnnnnnnnnnnnnnnnnnnnnnnnnnnnnnnnnnnnnnnnnnnnnnnnnnnnnnnnnnnnnnnnnnnnnnnnnnnnnnnnnnnnnnnnnnnnnnnnnnnnnnnnnnnnnnnnnnnnnnnnnnnnnnnnnnnnnnnnnnnnnnnnnnnnnnnnnnnnnnnnnnnnnnnnnnnnnnnnnnnnnnnnnnnnnnnnnnnnnnnnnnnnnnnnnnnnnnnnnnnnnnnnnnnnnnnnnnnnnnnnnnnnnnnnnnnnnnnnnnnnnnnnnnnnnnnnnnnnnnnnnnnnnnnnnnnnnnnnnnnnnnnnnnnnnnnnnnnnnnnnnnnnnnnnnnnnnnnnnnnnnnnnnnnnnnnnnnnnnnnnnnnnnnnnnnnnnnnnnnnnnnnnnnnnnnnnnnnnnnnnnnnnnnnnnnnnnnnnnnnnnnnnnnnnnnnnnnnnnnnnnnnnnnnnnnnnnnnnnnnnnnnnnnnnnnnnnnnnnnnnnnnnnnnnnnnnnnnnnnnnnnnnnnnnnnnnnnnnnnnnnnnnnnnnnnnnnnnnnnnnnnnnnnnnnnnnnnnnnnnnnnnnnnnnnnnnnnnnnnnnnnnnnnnnnnnnnnnnnnnnnnnnnnnnnnnnnnnnnnnnnnnnnnnnnnnnnnnnnnnnnnnnnnnnnnnnnnnnnnnnnnnnnnnnnnnnnnnnnnnnnnnnnnnnnnnnnnnnnnnnnnnnnnnnnnnnnnnnnnnnnnnnnnnnnnnnnnnnnnnnnnnnnnnnnnnnnnnnnnnnnnnnnnnnnnnnnnnnnnnnnnnnnnnnnnnnnnnnnnnnnnnnnnnnnnnnnnnnnnnnnnnnnnnnnnnnnnnnnnnnnnnnnnnnnnnnnnnnnnnnnnnnnnnnnnnnnnnnnnnnnnnnnnnnnnnnnnnnnnnnnnnnnnnnnnnnnnnnnnnnnnnnnnnnnnnnnnnnnnnnnnnnnnnnnnnnnnnnnnnnnnnnnnnnnnnnnnnnnnnnnnnnnnnnnnnnnnnnnnnnnnnnnnnnnnnnnnnnnnnnnnnnnnnnnnnnnnnnnnnnnnnnnnnnnnnnnnnnnnnnnnnnnnnnnnnnnnnnnnnnnnnnnnnnnnnnnnnnnnnnnnnnnnnnnnnnnnnnnnnnnnnnnnnnnnnnnnnnnnnnnnnnnnnnnnnnnnnnnnnnnnnnnnnnnnnnnnnnnnnnnnnnnnnnnnnnnnnnnnnnnnnnnnnnnnnnnnnnnnnnnnnnnnnnnnnnnnnnnnnnnnnnnnnnnnnnnnnnnnnnnnnnnnnnnnnnnnnnnnnnnnnnnnnnnnnnnnnnnnnnnnnnnnnnnnnnnnnnnnnnnnnnnnnnnnnnnnnnnnnnnnnnnnnnnnnnnnnnnnnnnnnnnnnnnnnnnnnnnnnnnnnnnnnnnnnnnnnnnnnnnnnnnnnnnnnnnnnnnnnnnnnnnnnnnnnnnnnnnnnnnnnnnnnnnnnnnnnnnnnnnnnnnnnnnnnnnnnnnnnnnnnnnnnnnnnnnnnnnnnnnnnnnnnnnnnnnnnnnnnnnnnnnnnnnnnnnnnnnnnnnnnnnnnnnnnnnnnnnnnnnnnnnnnnnnnnnnnnnnnnnnnnnnnnnnnnnnnnnnnnnnnnnnnnnnnnnnnnnnnnnnnnnnnnnnnnnnnnnnnnnnnnnnnnnnnnnnnnnnnnnnnnnnnnnnnnnnnnnnnnnnnnnnnnnnnnnnnnnnnnnnnnnnnnnnnnnnnnnnnnnnnnnnnnnnnnnnnnnnnnnnnnnnnnnnnnnnnnnnnnnnnnnnnnnnnnnnnnnnnnnnnnnnnnnnnnnnnnnnnnnnnnnnnnnnnnnnnnnnnnnnnnnnnnnnnnnnnnnnnnnnnnnnnnnnnnnnnnnnnnnnnnnnnnnnnnnnnnnnnnnnnnnnnnnnnnnnnnnnnnnnnnnnnnnnnnnnnnnnnnnnnnnnnnnnnnnnnnnnnnnnnnnnnnnnnnnnnnnnnnnnnnnnnnnnnnnnnnnnnnnnnnnnnnnnnnnnnnnnnnnnnnnnnnnnnnnnnnnnnnnnnnnnnnnnnnnnnnnnnnnnnnnnnnnnnnnnnnnnnnnnnnnnnnnnnnnnnnnnnnnnnnnnnnnnnnnnnnnnnnnnnnnnnnnnnnnnnnnnnnnnnnnnnnnnnnnnnnnnnnnnnnnnnnnnnnnnnnnnnnnnnnnnnnnnnnnnnnnnnnnnnnnnnnnnnnnnnnnnnnnnnnnnnnnnnnnnnnnnnnnnnnnnnnnnnnnnnnnnnnnnnnnnnnnnnnnnnnnnnnnnnnnnnnnnnnnnnnnnnnnnnnnnnnnnnnnnnnnnnnnnnnnnnnnnnnnnnnnnnnnnnnnnnnnnnnnnnnnnnnnnnnnnnnnnnnnnnnnnnnnnnnnnnnnnnnnnnnnnnnnnnnnnnnnnnnnnnnnnnnnnnnnnnnnnnnnnnnnnnnnnnnnnnnnnnnnnnnnnnnnnnnnnnnnnnnnnnnnnnnnnnnnnnnnnnnnnnnnnnnnnnnnnnnnnnnnnnnnnnnnnnnnnnnnnnnnnnnnnnnnnnnnnnnnnnnnnnnnnnnnnnnnnnnnnnnnnnnnnnnnnnnnnnnnnnnnnnnnnnnnnnnnnnnnnnnnnnnnnnnnnnnnnnnnnnnnnnnnnnnnnnnnnnnnnnnnnnnnnnnnnnnnnnnnnnnnnnnnnnnnnnnnnnnnnnnnnnnnnnnnnnnnnnnnnnnnnnnnnnnnnnnnnnnnnnnnnnnnnnnnnnnnnnnnnnnnnnnnnnnnnnnnnnnnnnnnnnnnnnnnnnnnnnnnnnnnnnnnnnnnnnnnnnnnnnnnnnnnnnnnnnnnnnnnnnnnnnnnnnnnnnnnnnnnnnnnnnnnnnnnnnnnnnnnnnnnnnnnnnnnnnnnnnnnnnnnnnnnnnnnnnnnnnnnnnnnnnnnnnnnnnnnnnnnnnnnnnnnnnnnnnnnnnnnnnnnnnnnnnnnnnnnnnnnnnnnnnnnnnnnnnnnnnnnnnnnnnnnnnnnnnnnnnnnnnnnnnnnnnnnnnnnnnnnnnnnnnnnnnnnnnnnnnnnnnnnnnnnnnnnnnnnnnnnnnnnnnnnnnnnnnnnnnnnnnnnnnnnnnnnnnnnnnnnnnnnnnnnnnnnnnnnnnnnnnnnnnnnnnnnnnnnnnnnnnnnnnnnnnnnnnnnnnnnnnnnnnnnnnnnnnnnnnnnnnnnnnnnnnnnnnnnnnnnnnnnnnnnnnnnnnnnnnnnnnnnnnnnnnnnnnnnnnnnnnnnnnnnnnnnnnnnnnnnnnnnnnnnnnnnnnnnnnnnnnnnnnnnnnnnnnnnnnnnnnnnnnnnnnnnnnnnnnnnnnnnnnnnnnnnnnnnnnnnnnnnnnnnnnnnnnnnnnnnnnnnnnnnnnnnnnnnnnnnnnnnnnnnnnnnnnnnnnnnnnnnnnnnnnnnnnnnnnnnnnnnnnnnnnnnnnnnnnnnnnnnnnnnnnnnnnnnnnnnnnnnnnnnnnnnnnnnnnnnnnnnnnnnnnnnnnnnnnnnnnnnnnnnnnnnnnnnnnnnnnnnnnnnnnnnnnnnnnnnnnnnnnnnnnnnnnnnnnnnnnnnnnnnnnnnnnnnnnnnnnnnnnnnnnnnnnnnnnnnnnnnnnnnnnnnnnnnnnnnnnnnnnnnnnnnnnnnnnnnnnnnnnnnnnnnnnnnnnnnnnnnnnnnnnnnnnnnnnnnnnnnnnnnnnnnnnnnnnnnnnnnnnnnnnnnnnnnnnnnnnnnnnnnnnnnnnnnnnnnnnnnnnnnnnnnnnnnnnnnnnnnnnnnnnnnnnnnnnnnnnnnnnnnnnnnnnnnnnnnnnnnnnnnnnnnnnnnnnnnnnnnnnnnnnnnnnnnnnnnnnnnnnnnnnnnnnnnnnnnnnnnnnnnnnnnnnnnnnnnnnnnnnnnnnnnnnnnnnnnnnnnnnnnnnnnnnnnnnnnnnnnnnnnnnnnnnnnnnnnnnnnnnnnnnnnnnnnnnnnnnnnnnnnnnnnnnnnnnnnnnnnnnnnnnnnnnnnnnnnnnnnnnnnnnnnnnnnnnnnnnnnnnnnnnnnnnnnnnnnnnnnnnnnnnnnnnnnnnnnnnnnnnnnnnnnnnnnnnnnnnnnnnnnnnnnnnnnnnnnnnnnnnnnnnnnnnnnnnnnnnnnnnnnnnnnnnnnnnnnnnnnnnnnnnnnnnnnnnnnnnnnnnnnnnnnnnnnnnnnnnnnnnnnnnnnnnnnnnnnnnnnnnnnnnnnnnnnnnnnnnnnnnnnnnnnnnnnnnnnnnnnnnnnnnnnnnnnnnnnnnnnnnnnnnnnnnnnnnnnnnnnnnnnnnnnnnnnnnnnnnnnnnnnnnnnnnnnnnnnnnnnnnnnnnnnnnnnnnnnnnnnnnnnnnnnnnnnnnnnnnnnnnnnnnnnnnnnnnnnnnnnnnnnnnnnnnnnnnnnnnnnnnnnnnnnnnnnnnnnnnnnnnnnnnnnnnnnnnnnnnnnnnnnnnnnnnnnnnnnnnnnnnnnnnnnnnnnnnnnnnnnnnnnnnnnnnnnnnnnnnnnnnnnnnnnnnnnnnnnnnnnnnnnnnnnnnnnnnnnnnnnnnnnnnnnnnnnnnnnnnnnnnnnnnnnnnnnnnnnnnnnnnnnnnnnnnnnnnnnnnnnnnnnnnnnnnnnnnnnnnnnnnnnnnnnnnnnnnnnnnnnnnnnnnnnnnnnnnnnnnnnnnnnnnnnnnnnnnnnnnnnnnnnnnnnnnnnnnnnnnnnnnnnnnnnnnnnnnnnnnnnnnnnnnnnnnnnnnnnnnnnnnnnnnnnnnnnnnnnnnnnnnnnnnnnnnnnnnnnnnnnnnnnnnnnnnnnnnnnnnnnnnnnnnnnnnnnnnnnnnnnnnnnnnnnnnnnnnnnnnnnnnnnnnnnnnnnnnnnnnnnnnnnnnnnnnnnnnnnnnnnnnnnnnnnnnnnnnnnnnnnnnnnnnnnnnnnnnnnnnnnnnnnnnnnnnnnnnnnnnnnnnnnnnnnnnnnnnnnnnnnnnnnnnnnnnnnnnnnnnnnnnnnnnnnnnnnnnnnnnnnnnnnnnnnnnnnnnnnnnnnnnnnnnnnnnnnnnnnnnnnnnnnnnnnnnnnnnnnnnnnnnnnnnnnnnnnnnnnnnnnnnnnnnnnnnnnnnnnnnnnnnnnnnnnnnnnnnnnnnnnnnnnnnnnnnnnnnnnnnnnnnnnnnnnnnnnnnnnnnnnnnnnnnnnnnnnnnnnnnnnnnnnnnnnnnnnnnnnnnnnnnnnnnnnnnnnnnnnnnnnnnnnnnnnnnnnnnnnnnnnnnnnnnnnnnnnnnnnnnnnnnnnnnnnnnnnnnnnnnnnnnnnnnnnnnnnnnnnnnnnnnnnnnnnnnnnnnnnnnnnnnnnnnnnnnnnnnnnnnnnnnnnnnnnnnnnnnnnnnnnnnnnnnnnnnnnnnnnnnnnnnnnnnnnnnnnnnnnnnnnnnnnnnnnnnnnnnnnnnnnnnnnnnnnnnnnnnnnnnnnnnnnnnnnnnnnnnnnnnnnnnnnnnnnnnnnnnnnnnnnnnnnnnnnnnnnnnnnnnnnnnnnnnnnnnnnnnnnnnnnnnnnnnnnnnnnnnnnnnnnnnnnnnnnnnnnnnnnnnnnnnnnnnnnnnnnnnnnnnnnnnnnnnnnnnnnnnnnnnnnnnnnnnnnnnnnnnnnnnnnnnnnnnnnnnnnnnnnnnnnnnnnnnnnnnnnnnnnnnnnnnnnnnnnnnnnnnnnnnnnnnnnnnnnnnnnnnnnnnnnnnnnnnnnnnnnnnnnnnnnnnnnnnnnnnnnnnnnnnnnnnnnnnnnnnnnnnnnnnnnnnnnnnnnnnnnnnnnnnnnnnnnnnnnnnnnnnnnnnnnnnnnnnnnnnnnnnnnnnnnnnnnnnnnnnnnnnnnnnnnnnnnnnnnnnnnnnnnnnnnnnnnnnnnnnnnnnnnnnnnnnnnnnnnnnnnnnnnnnnnnnnnnnnnnnnnnnnnnnnnnnnnnnnnnnnnnnnnnnnnnnnnnnnnnnnnnnnnnnnnnnnnnnnnnnnnnnnnnnnnnnnnnnnnnnnnnnnnnnnnnnnnnnnnnnnnnnnnnnnnnnnnnnnnnnnnnnnnnnnnnnnnnnnnnnnnnnnnnnnnnnnnnnnnnnnnnnnnnnnnnnnnnnnnnnnnnnnnnnnnnnnnnnnnnnnnnnnnnnnnnnnnnnnnnnnnnnnnnnnnnnnnnnnnnnnnnnnnnnnnnnnnnnnnnnnnnnnnnnnnnnnnnnnnnnnnnnnnnnnnnnnnnnnnnnnnnnnnnnnnnnnnnnnnnnnnnnnnnnnnnnnnnnnnnnnnnnnnnnnnnnnnnnnnnnnnnnnnnnnnnnnnnnnnnnnnnnnnnnnnnnnnnnnnnnnnnnnnnnnnnnnnnnnnnnnnnnnnnnnnnnnnnnnnnnnnnnnnnnnnnnnnnnnnnnnnnnnnnnnnnnnnnnnnnnnnnnnnnnnnnnnnnnnnnnnnnnnnnnnnnnnnnnnnnnnnnnnnnnnnnnnnnnnnnnnnnnnnnnnnnnnnnnnnnnnnnnnnnnnnnnnnnnnnnnnnnnnnnnnnnnnnnnnnnnnnnnnnnnnnnnnnnnnnnnnnnnnnnnnnnnnnnnnnnnnnnnnnnnnnnnnnnnnnnnnnnnnnnnnnnnnnnnnnnnnnnnnnnnnnnnnnnnnnnnnnnnnnnnnnnnnnnnnnnnnnnnnnnnnnnnnnnnnnnnnnnnnnnnnnnnnnnnnnnnnnnnnnnnnnnnnnnnnnnnnnnnnnnnnnnnnnnnnnnnnnnnnnnnnnnnnnnnnnnnnnnnnnnnnnnnnnnnnnnnnnnnnnnnnnnnnnnnnnnnnnnnnnnnnnnnnnnnnnnnnnnnnnnnnnnnnnnnnnnnnnnnnnnnnnnnnnnnnnnnnnnnnnnnnnnnnnnnnnnnnnnnnnnnnnnnnnnnnnnnnnnnnnnnnnnnnnnnnnnnnnnnnnnnnnnnnnnnnnnnnnnnnnnnnnnnnnnnnnnnnnnnnnnnnnnnnnnnnnnnnnnnnnnnnnnnnnnnnnnnnnnnnnnnnnnnnnnnnnnnnnnnnnnnnnnnnnnnnnnnnnnnnnnnnnnnnnnnnnnnnnnnnnnnnnnnnnnnnnnnnnnnnnnnnnnnnnnnnnnnnnnnnnnnnnnnnnnnnnnnnnnnnnnnnnnnnnnnnnnnnnnnnnnnnnnnnnnnnnnnnnnnnnnnnnnnnnnnnnnnnnnnnnnnnnnnnnnnnnnnnnnnnnnnnnnnnnnnnnnnnnnnnnnnnnnnnnnnnnnnnnnnnnnnnnnnnnnnnnnnnnnnnnnnnnnnnnnnnnnnnnnnnnnnnnnnnnnnnnnnnnnnnnnnnnnnnnnnnnnnnnnnnnnnnnnnnnnnnnnnnnnnnnnnnnnnnnnnnnnnnnnnnnnnnnnnnnnnnnnnnnnnnnnnnnnnnnnnnnnnnnnnnnnnnnnnnnnnnnnnnnnnnnnnnnnnnnnnnnnnnnnnnnnnnnnnnnnnnnnnnnnnnnnnnnnnnnnnnnnnnnnnnnnnnnnnnnnnnnnnnnnnnnnnnnnnnnnnnnnnnnnnnnnnnnnnnnnnnnnnnnnnnnnnnnnnnnnnnnnnnnnnnnnnnnnnnnnnnnnnnnnnnnnnnnnnnnnnnnnnnnnnnnnnnnnnnnnnnnnnnnnnnnnnnnnnnnnnnnnnnnnnnnnnnnnnnnnnnnnnnnnnnnnnnnnnnnnnnnnnnnnnnnnnnnnnnnnnnnnnnnnnnnnnnnnnnnnnnnnnnnnnnnnnnnnnnnnnnnnnnnnnnnnnnnnnnnnnnnnnnnnnnnnnnnnnnnnnnnnnnnnnnnnnnnnnnnnnnnnnnnnnnnnnnnnnnnnnnnnnnnnnnnnnnnnnnnnnnnnnnnnnnnnnnnnnnnnnnnnnnnnnnnnnnnnnnnnnnnnnnnnnnnnnnnnnnnnnnnnnnnnnnnnnnnnnnnnnnnnnnnnnnnnnnnnnnnnnnnnnnnnnnnnnnnnnnnnnnnnnnnnnnnnnnnnnnnnnnnnnnnnnnnnnnnnnnnnnnnnnnnnnnnnnnnnnnnnnnnnnnnnnnnnnnnnnnnnnnnnnnnnnnnnnnnnnnnnnnnnnnnnnnnnnnnnnnnnnnnnnnnnnnnnnnnnnnnnnnnnnnnnnnnnnnnnnnnnnnnnnnnnnnnnnnnnnnnnnnnnnnnnnnnnnnnnnnnnnnnnnnnnnnnnnnnnnnnnnnnnnnnnnnnnnnnnnnnnnnnnnnnnnnnnnnnnnnnnnnnnnnnnnnnnnnnnnnnnnnnnnnnnnnnnnnnnnnnnnnnnnnnnnnnnnnnnnnnnnnnnnnnnnnnnnnnnnnnnnnnnnnnnnnnnnnnnnnnnnnnnnnnnnnnnnnnnnnnnnnnnnnnnnnnnnnnnnnnnnnnnnnnnnnnnnnnnnnnnnnnnnnnnnnnnnnnnnnnnnnnnnnnnnnnnnnnnnnnnnnnnnnnnnnnnnnnnnnnnnnnnnnnnnnnnnnnnnnnnnnnnnnnnnnnnnnnnnnnnnnnnnnnnnnnnnnnnnnnnnnnnnnnnnnnnnnnnnnnnnnnnnnnnnnnnnnnnnnnnnnnnnnnnnnnnnnnnnnnnnnnnnnnnnnnnnnnnnnnnnnnnnnnnnnnnnnnnnnnnnnnnnnnnnnnnnnnnnnnnnnnnnnnnnnnnnnnnnnnnnnnnnnnnnnnnnnnnnnnnnnnnnnnnnnnnnnnnnnnnnnnnnnnnnnnnnnnnnnnnnnnnnnnnnnnnnnnnnnnnnnnnnnnnnnnnnnnnnnnnnnnnnnnnnnnnnnnnnnnnnnnnnnnnnnnnnnnnnnnnnnnnnnnnnnnnnnnnnnnnnnnnnnnnnnnnnnnnnnnnnnnnnnnnnnnnnnnnnnnnnnnnnnnnnnnnnnnnnnnnnnnnnnnnnnnnnnnnnnnnnnnnnnnnnnnnnnnnnnnnnnnnnnnnnnnnnnnnnnnnnnnnnnnnnnnnnnnnnnnnnnnnnnnnnnnnnnnnnnnnnnnnnnnnnnnnnnnnnnnnnnnnnnnnnnnnnnnnnnnnnnnnnnnnnnnnnnnnnnnnnnnnnnnnnnnnnnnnnnnnnnnnnnnnnnnnnnnnnnnnnnnnnnnnnnnnnnnnnnnnnnnnnnnnnnnnnnnnnnnnnnnnnnnnnnnnnnnnnnnnnnnnnnnnnnnnnnnnnnnnnnnnnnnnnnnnnnnnnnnnnnnnnnnnnnnnnnnnnnnnnnnnnnnnnnnnnnnnnnnnnnnnnnnnnnnnnnnnnnnnnnnnnnnnnnnnnnnnnnnnnnnnnnnnnnnnnnnnnnnnnnnnnnnnnnnnnnnnnnnnnnnnnnnnnnnnnnnnnnnnnnnnnnnnnnnnnnnnnnnnnnnnnnnnnnnnnnnnnnnnnnnnnnnnnnnnnnnnnnnnnnnnnnnnnnnnnnnnnnnnnnnnnnnnnnnnnnnnnnnnnnnnnnnnnnnnnnnnnnnnnnnnnnnnnnnnnnnnnnnnnnnnnnnnnnnnnnnnnnnnnnnnnnnnnnnnnnnnnnnnnnnnnnnnnnnnnnnnnnnnnnnnnnnnnnnnnnnnnnnnnnnnnnnnnnnnnnnnnnnnnnnnnnnnnnnnnnnnnnnnnnnnnnnnnnnnnnnnnnnnnnnnnnnnnnnnnnnnnnnnnnnnnnnnnnnnnnnnnnnnnnnnnnnnnnnnnnnnnnnnnnnnnnnnnnnnnnnnnnnnnnnnnnnnnnnnnnnnnnnnnnnnnnnnnnnnnnnnnnnnnnnnnnnnnnnnnnnnnnnnnnnnnnnnnnnnnnnnnnnnnnnnnnnnnnnnnnnnnnnnnnnnnnnnnnnnnnnnnnnnnnnnnnnnnnnnnnnnnnnnnnnnnnnnnnnnnnnnnnnnnnnnnnnnnnnnnnnnnnnnnnnnnnnnnnnnnnnnnnnnnnnnnnnnnnnnnnnnnnnnnnnnnnnnnnnnnnnnnnnnnnnnnnnnnnnnnnnnnnnnnnnnnnnnnnnnnnnnnnnnnnnnnnnnnnnnnnnnnnnnnnnnnnnnnnnnnnnnnnnnnnnnnnnnnnnnnnnnnnnnnnnnnnnnnnnnnnnnnnnnnnnnnnnnnnnnnnnnnnnnnnnnnnnnnnnnnnnnnnnnnnnnnnnnnnnnnnnnnnnnnnnnnnnnnnnnnnnnnnnnnnnnnnnnnnnnnnnnnnnnnnnnnnnnnnnnnnnnnnnnnnnnnnnnnnnnnnnnnnnnnnnnnnnnnnnnnnnnnnnnnnnnnnnnnnnnnnnnnnnnnnnnnnnnnnnnnnnnnnnnnnnnnnnnnnnnnnnnnnnnnnnnnnnnnnnnnnnnnnnnnnnnnnnnnnnnnnnnnnnnnnnnnnnnnnnnnnnnnnnnnnnnnnnnnnnnnnnnnnnnnnnnnnnnnnnnnnnnnnnnnnnnnnnnnnnnnnnnnnnnnnnnnnnnnnnnnnnnnnnnnnnnnnnnnnnnnnnnnnnnnnnnnnnnnnnnnnnnnnnnnnnnnnnnnnnnnnnnnnnnnnnnnnnnnnnnnnnnnnnnnnnnnnnnnnnnnnnnnnnnnnnnnnnnnnnnnnnnnnnnnnnnnnnnnnnnnnnnnnnnnnnnnnnnnnnnnnnnnnnnnnnnnnnnnnnnnnnnnnnnnnnnnnnnnnnnnnnnnnnnnnnnnnnnnnnnnnnnnnnnnnnnnnnnnnnnnnnnnnnnnnnnnnnnnnnnnnnnnnnnnnnnnnnnnnnnnnnnnnnnnnnnnnnnnnnnnnnnnnnnnnnnnnnnnnnnnnnnnnnnnnnnnnnnnnnnnnnnnnnnnnnnnnnnnnnnnnnnnnnnnnnnnnnnnnnnnnnnnnnnnnnnnnnnnnnnnnnnnnnnnnnnnnnnnnnnnnnnnnnnnnnnnnnnnnnnnnnnnnnnnnnnnnnnnnnnnnnnnnnnnnnnnnnnnnnnnnnnnnnnnnnnnnnnnnnnnnnnnnnnnnnnnnnnnnnnnnnnnnnnnnnnnnnnnnnnnnnnnnnnnnnnnnnnnnnnnnnnnnnnnnnnnnnnnnnnnnnnnnnnnnnnnnnnnnnnnnnnnnnnnnnnnnnnnnnnnnnnnnnnnnnnnnnnnnnnnnnnnnnnnnnnnnnnnnnnnnnnnnnnnnnnnnnnnnnnnnnnnnnnnnnnnnnnnnnnnnnnnnnnnnnnnnnnnnnnnnnnnnnnnnnnnnnnnnnnnnnnnnnnnnnnnnnnnnnnnnnnnnnnnnnnnnnnnnnnnnnnnnnnnnnnnnnnnnnnnnnnnnnnnnnnnnnnnnnnnnnnnnnnnnnnnnnnnnnnnnnnnnnnnnnnnnnnnnnnnnnnnnnnnnnnnnnnnnnnnnnnnnnnnnnnnnnnnnnnnnnnnnnnnnnnnnnnnnnnnnnnnnnnnnnnnnnnnnnnnnnnnnnnnnnnnnnnnnnnnnnnnnnnnnnnnnnnnnnnnnnnnnnnnnnnnnnnnnnnnnnnnnnnnnnnnnnnnnnnnnnnnnnnnnnnnnnnnnnnnnnnnnnnnnnnnnnnnnnnnnnnnnnnnnnnnnnnnnnnnnnnnnnnnnnnnnnnnnnnnnnnnnnnnnnnnnnnnnnnnnnnnnnnnnnnnnnnnnnnnnnnnnnnnnnnnnnnnnnnnnnnnnnnnnnnnnnnnnnnnnnnnnnnnnnnnnnnnnnnnnnnnnnnnnnnnnnnnnnnnnnnnnnnnnnnnnnnnnnnnnnnnnnnnnnnnnnnnnnnnnnnnnnnnnnnnnnnnnnnnnnnnnnnnnnnnnnnnnnnnnnnnnnnnnnnnnnnnnnnnnnnnnnnnnnnnnnnnnnnnnnnnnnnnnnnnnnnnnnnnnnnnnnnnnnnnnnnnnnnnnnnnnnnnnnnnnnnnnnnnnnnnnnnnnnnnnnnnnnnnnnnnnnnnnnnnnnnnnnnnnnnnnnnnnnnnnnnnnnnnnnnnnnnnnnnnnnnnnnnnnnnnnnnnnnnnnnnnnnnnnnnnnnnnnnnnnnnnnnnnnnnnnnnnnnnnnnnnnnnnnnnnnnnnnnnnnnnnnnnnnnnnnnnnnnnnnnnnnnnnnnnnnnnnnnnnnnnnnnnnnnnnnnnnnnnnnnnnnnnnnnnnnnnnnnnnnnnnnnnnnnnnnnnnnnnnnnnnnnnnnnnnnnnnnnnnnnnnnnnnnnnnnnnnnnnnnnnnnnnnnnnnnnnnnnnnnnnnnnnnnnnnnnnnnnnnnnnnnnnnnnnnnnnnnnnnnnnnnnnnnnnnnnnnnnnnnnnnnnnnnnnnnnnnnnnnnnnnnnnnnnnnnnnnnnnnnnnnnnnnnnnnnnnnnnnnnnnnnnnnnnnnnnnnnnnnnnnnnnnnnnnnnnnnnnnnnnnnnnnnnnnnnnnnnnnnnnnnnnnnnnnnnnnnnnnnnnnnnnnnnnnnnnnnnnnnnnnnnnnnnnnnnnnnnnnnnnnnnnnnnnnnnnnnnnnnnnnnnnnnnnnnnnnnnnnnnnnnnnnnnnnnnnnnnnnnnnnnnnnnnnnnnnnnnnnnnnnnnnnnnnnnnnnnnnnnnnnnnnnnnnnnnnnnnnnnnnnnnnnnnnnnnnnnnnnnnnnnnnnnnnnnnnnnnnnnnnnnnnnnnnnnnnnnnnnnnnnnnnnnnnnnnnnnnnnnnnnnnnnnnnnnnnnnnnnnnnnnnnnnnnnnnnnnnnnnnnnnnnnnnnnnnnnnnnnnnnnnnnnnnnnnnnnnnnnnnnnnnnnnnnnnnnnnnnnnnnnnnnnnnnnnnnnnnnnnnnnnnnnnnnnnnnnnnnnnnnnnnnnnnnnnnnnnnnnnnnnnnnnnnnnnnnnnnnnnnnnnnnnnnnnnnnnnnnnnnnnnnnnnnnnnnnnnnnnnnnnnnnnnnnnnnnnnnnnnnnnnnnnnnnnnnnnnnnnnnnnnnnnnnnnnnnnnnnnnnnnnnnnnnnnnnnnnnnnnnnnnnnnnnnnnnnnnnnnnnnnnnnnnnnnnnnnnnnnnnnnnnnnnnnnnnnnnnnnnnnnnnnnnnnnnnnnnnnnnnnnnnnnnnnnnnnnnnnnnnnnnnnnnnnnnnnnnnnnnnnnnnnnnnnnnnnnnnnnnnnnnnnnnnnnnnnnnnnnnnnnnnnnnnnnnnnnnnnnnnnnnnnnnnnnnnnnnnnnnnnnnnnnnnnnnnnnnnnnnnnnnnnnnnnnnnnnnnnnnnnnnnnnnnnnnnnnnnnnnnnnnnnnnnnnnnnnnnnnnnnnnnnnnnnnnnnnnnnnnnnnnnnnnnnnnnnnnnnnnnnnnnnnnnnnnnnnnnnnnnnnnnnnnnnnnnnnnnnnnnnnnnnnnnnnnnnnnnnnnnnnnnnnnnnnnnnnnnnnnnnnnnnnnnnnnnnnnnnnnnnnnnnnnnnnnnnnnnnnnnnnnnnnnnnnnnnnnnnnnnnnnnnnnnnnnnnnnnnnnnnnnnnnnnnnnnnnnnnnnnnnnnnnnnnnnnnnnnnnnnnnnnnnnnnnnnnnnnnnnnnnnnnnnnnnnnnnnnnnnnnnnnnnnnnnnnnnnnnnnnnnnnnnnnnnnnnnnnnnnnnnnnnnnnnnnnnnnnnnnnnnnnnnnnnnnnnnnnnnnnnnnnnnnnnnnnnnnnnnnnnnnnnnnnnnnnnnnnnnnnnnnnnnnnnnnnnnnnnnnnnnnnnnnnnnnnnnnnnnnnnnnnnnnnnnnnnnnnnnnnnnnnnnnnnnnnnnnnnnnnnnnnnnnnnnnnnnnnnnnnnnnnnnnnnnnnnnnnnnnnnnnnnnnnnnnnnnnnnnnnnnnnnnnnnnnnnnnnnnnnnnnnnnnnnnnnnnnnnnnnnnnnnnnnnnnnnnnnnnnnnnnnnnnnnnnnnnnnnnnnnnnnnnnnnnnnnnnnnnnnnnnnnnnnnnnnnnnnnnnnnnnnnnnnnnnnnnnnnnnnnnnnnnnnnnnnnnnnnnnnnnnnnnnnnnnnnnnnnnnnnnnnnnnnnnnnnnnnnnnnnnnnnnnnnnnnnnnnnnnnnnnnnnnnnnnnnnnnnnnnnnnnnnnnnnnnnnnnnnnnnnnnnnnnnnnnnnnnnnnnnnnnnnnnnnnnnnnnnnnnnnnnnnnnnnnnnnnnnnnnnnnnnnnnnnnnnnnnnnnnnnnnnnnnnnnnnnnnnnnnnnnnnnnnnnnnnnnnnnnnnnnnnnnnnnnnnnnnnnnnnnnnnnnnnnnnnnnnnnnnnnnnnnnnnnnnnnnnnnnnnnnnnnnnnnnnnnnnnnnnnnnnnnnnnnnnnnnnnnnnnnnnnnnnnnnnnnnnnnnnnnnnnnnnnnnnnnnnnnnnnnnnnnnnnnnnnnnnnnnnnnnnnnnnnnnnnnnnnnnnnnnnnnnnnnnnnnnnnnnnnnnnnnnnnnnnnnnnnnnnnnnnnnnnnnnnnnnnnnnnnnnnnnnnnnnnnnnnnnnnnnnnnnnnnnnnnnnnnnnnnnnnnnnnnnnnnnnnnnnnnnnnnnnnnnnnnnnnnnnnnnnnnnnnnnnnnnnnnnnnnnnnnnnnnnnnnnnnnnnnnnnnnnnnnnnnnnnnnnnnnnnnnnnnnnnnnnnnnnnnnnnnnnnnnnnnnnnnnnnnnnnnnnnnnnnnnnnnnnnnnnnnnnnnnnnnnnnnnnnnnnnnnnnnnnnnnnnnnnnnnnnnnnnnnnnnnnnnnnnnnnnnnnnnnnnnnnnnnnnnnnnnnnnnnnnnnnnnnnnnnnnnnnnnnnnnnnnnnnnnnnnnnnnnnnnnnnnnnnnnnnnnnnnnnnnnnnnnnnnnnnnnnnnnnnnnnnnnnnnnnnnnnnnnnnnnnnnnnnnnnnnnnnnnnnnnnnnnnnnnnnnnnnnnnnnnnnnnnnnnnnnnnnnnnnnnnnnnnnnnnnnnnnnnnnnnnnnnnnnnnnnnnnnnnnnnnnnnnnnnnnnnnnnnnnnnnnnnnnnnnnnnnnnnnnnnnnnnnnnnnnnnnnnnnnnnnnnnnnnnnnnnnnnnnnnnnnnnnnnnnnnnnnnnnnnnnnnnnnnnnnnnnnnnnnnnnnnnnnnnnnnnnnnnnnnnnnnnnnnnnnnnnnnnnnnnnnnnnnnnnnnnnnnnnnnnnnnnnnnnnnnnnnnnnnnnnnnnnnnnnnnnnnnnnnnnnnnnnnnnnnnnnnnnnnnnnnnnnnnnnnnnnnnnnnnnnnnnnnnnnnnnnnnnnnnnnnnnnnnnnnnnnnnnnnnnnnnnnnnnnnnnnnnnnnnnnnnnnnnnnnnnnnnnnnnnnnnnnnnnnnnnnnnnnnnnnnnnnnnnnnnnnnnnnnnnnnnnnnnnnnnnnnnnnnnnnnnnnnnnnnnnnnnnnnnnnnnnnnnnnnnnnnnnnnnnnnnnnnnnnnnnnnnnnnnnnnnnnnnnnnnnnnnnnnnnnnnnnnnnnnnnnnnnnnnnnnnnnnnnnnnnnnnnnnnnnnnnnnnnnnnnnnnnnnnnnnnnnnnnnnnnnnnnnnnnnnnnnnnnnnnnnnnnnnnnnnnnnnnnnnnnnnnnnnnnnnnnnnnnnnnnnnnnnnnnnnnnnnnnnnnnnnnnnnnnnnnnnnnnnnnnnnnnnnnnnnnnnnnnnnnnnnnnnnnnnnnnnnnnnnnnnnnnnnnnnnnnnnnnnnnnnnnnnnnnnnnnnnnnnnnnnnnnnnnnnnnnnnnnnnnnnnnnnnnnnnnnnnnnnnnnnnnnnnnnnnnnnnnnnnnnnnnnnnnnnnnnnnnnnnnnnnnnnnnnnnnnnnnnnnnnnnnnnnnnnnnnnnnnnnnnnnnnnnnnnnnnnnnnnnnnnnnnnnnnnnnnnnnnnnnnnnnnnnnnnnnnnnnnnnnnnnnnnnnnnnnnnnnnnnnnnnnnnnnnnnnnnnnnnnnnnnnnnnnnnnnnnnnnnnnnnnnnnnnnnnnnnnnnnnnnnnnnnnnnnnnnnnnnnnnnnnnnnnnnnnnnnnnnnnnnnnnnnnnnnnnnnnnnnnnnnnnnnnnnnnnnnnnnnnnnnnnnnnnnnnnnnnnnnnnnnnnnnnnnnnnnnnnnnnnnnnnnnnnnnnnnnnnnnnnnnnnnnnnnnnnnnnnnnnnnnnnnnnnnnnnnnnnnnnnnnnnnnnnnnnnnnnnnnnnnnnnnnnnnnnnnnnnnnnnnnnnnnnnnnnnnnnnnnnnnnnnnnnnnnnnnnnnnnnnnnnnnnnnnnnnnnnnnnnnnnnnnnnnnnnnnnnnnnnnnnnnnnnnnnnnnnnnnnnnnnnnnnnnnnnnnnnnnnnnnnnnnnnnnnnnnnnnnnnnnnnnnnnnnnnnnnnnnnnnnnnnnnnnnnnnnnnnnnnnnnnnnnnnnnnnnnnnnnnnnnnnnnnnnnnnnnnnnnnnnnnnnnnnnnnnnnnnnnnnnnnnnnnnnnnnnnnnnnnnnnnnnnnnnnnnnnnnnnnnnnnnnnnnnnnnnnnnnnnnnnnnnnnnnnnnnnnnnnnnnnnnnnnnnnnnnnnnnnnnnnnnnnnnnnnnnnnnnnnnnnnnnnnnnnnnnnnnnnnnnnnnnnnnnnnnnnnnnnnnnnnnnnnnnnnnnnnnnnnnnnnnnnnnnnnnnnnnnnnnnnnnnnnnnnnnnnnnnnnnnnnnnnnnnnnnnnnnnnnnnnnnnnnnnnnnnnnnnnnnnnnnnnnnnnnnnnnnnnnnnnnnnnnnnnnnnnnnnnnnnnnnnnnnnnnnnnnnnnnnnnnnnnnnnnnnnnnnnnnnnnnnnnnnnnnnnnnnnnnnnnnnnnnnnnnnnnnnnnnnnnnnnnnnnnnnnnnnnnnnnnnnnnnnnnnnnnnnnnnnnnnnnnnnnnnnnnnnnnnnnnnnnnnnnnnnnnnnnnnnnnnnnnnnnnnnnnnnnnnnnnnnnnnnnnnnnnnnnnnnnnnnnnnnnnnnnnnnnnnnnnnnnnnnnnnnnnnnnnnnnnnnnnnnnnnnnnnnnnnnnnnnnnnnnnnnnnnnnnnnnnnnnnnnnnnnnnnnnnnnnnnnnnnnnnnnnnnnnnnnnnnnnnnnnnnnnnnnnnnnnnnnnnnnnnnnnnnnnnnnnnnnnnnnnnnnnnnnnnnnnnnnnnnnnnnnnnnnnnnnnnnnnnnnnnnnnnnnnnnnnnnnnnnnnnnnnnnnnnnnnnnnnnnnnnnnnnnnnnnnnnnnnnnnnnnnnnnnnnnnnnnnnnnnnnnnnnnnnnnnnnnnnnnnnnnnnnnnnnnnnnnnnnnnnnnnnnnnnnnnnnnnnnnnnnnnnnnnnnnnnnnnnnnnnnnnnnnnnnnnnnnnnnnnnnnnnnnnnnnnnnnnnnnnnnnnnnnnnnnnnnnnnnnnnnnnnnnnnnnnnnnnnnnnnnnnnnnnnnnnnnnnnnnnnnnnnnnnnnnnnnnnnnnnnnnnnnnnnnnnnnnnnnnnnnnnnnnnnnnnnnnnnnnnnnnnnnnnnnnnnnnnnnnnnnnnnnnnnnnnnnnnnnnnnnnnnnnnnnnnnnnnnnnnnnnnnnnnnnnnnnnnnnnnnnnnnnnnnnnnnnnnnnnnnnnnnnnnnnnnnnnnnnnnnnnnnnnnnnnnnnnnnnnnnnnnnnnnnnnnnnnnnnnnnnnnnnnnnnnnnnnnnnnnnnnnnnnnnnnnnnnnnnnnnnnnnnnnnnnnnnnnnnnnnnnnnnnnnnnnnnnnnnnnnnnnnnnnnnnnnnnnnnnnnnnnnnnnnnnnnnnnnnnnnnnnnnnnnnnnnnnnnnnnnnnnnnnnnnnnnnnnnnnnnnnnnnnnnnnnnnnnnnnnnnnnnnnnnnnnnnnnnnnnnnnnnnnnnnnnnnnnnnnnnnnnnnnnnnnnnnnnnnnnnnnnnnnnnnnnnnnnnnnnnnnnnnnnnnnnnnnnnnnnnnnnnnnnnnnnnnnnnnnnnnnnnnnnnnnnnnnnnnnnnnnnnnnnnnnnnnnnnnnnnnnnnnnnnnnnnnnnnnnnnnnnnnnnnnnnnnnnnnnnnnnnnnnnnnnnnnnnnnnnnnnnnnnnnnnnnnnnnnnnnnnnnnnnnnnnnnnnnnnnnnnnnnnnnnnnnnnnnnnnnnnnnnnnnnnnnnnnnnnnnnnnnnnnnnnnnnnnnnnnnnnnnnnnnnnnnnnnnnnnnnnnnnnnnnnnnnnnnnnnnnnnnnnnnnnnnnnnnnnnnnnnnnnnnnnnnnnnnnnnnnnnnnnnnnnnnnnnnnnnnnnnnnnnnnnnnnnnnnnnnnnnnnnnnnnnnnnnnnnnnnnnnnnnnnnnnnnnnnnnnnnnnnnnnnnnnnnnnnnnnnnnnnnnnnnnnnnnnnnnnnnnnnnnnnnnnnnnnnnnnnnnnnnnnnnnnnnnnnnnnnnnnnnnnnnnnnnnnnnnnnnnnnnnnnnnnnnnnnnnnnnnnnnnnnnnnnnnnnnnnnnnnnnnnnnnnnnnnnnnnnnnnnnnnnnnnnnnnnnnnnnnnnnnnnnnnnnnnnnnnnnnnnnnnnnnnnnnnnnnnnnnnnnnnnnnnnnnnnnnnnnnnnnnnnnnnnnnnnnnnnnnnnnnnnnnnnnnnnnnnnnnnnnnnnnnnnnnnnnnnnnnnnnnnnnnnnnnnnnnnnnnnnnnnnnnnnnnnnnnnnnnnnnnnnnnnnnnnnnnnnnnnnnnnnnnnnnnnnnnnnnnnnnnnnnnnnnnnnnnnnnnnnnnnnnnnnnnnnnnnnnnnnnnnnnnnnnnnnnnnnnnnnnnnnnnnnnnnnnnnnnnnnnnnnnnnnnnnnnnnnnnnnnnnnnnnnnnnnnnnnnnnnnnnnnnnnnnnnnnnnnnnnnnnnnnnnnnnnnnnnnnnnnnnnnnnnnnnnnnnnnnnnnnnnnnnnnnnnnnnnnnnnnnnnnnnnnnnnnnnnnnnnnnnnnnnnnnnnnnnnnnnnnnnnnnnnnnnnnnnnnnnnnnnnnnnnnnnnnnnnnnnnnnnnnnnnnnnnnnnnnnnnnnnnnnnnnnnnnnnnnnnnnnnnnnnnnnnnnnnnnnnnnnnnnnnnnnnnnnnnnnnnnnnnnnnnnnnnnnnnnnnnnnnnnnnnnnnnnnnnnnnnnnnnnnnnnnnnnnnnnnnnnnnnnnnnnnnnnnnnnnnnnnnnnnnnnnnnnnnnnnnnnnnnnnnnnnnnnnnnnnnnnnnnnnnnnnnnnnnnnnnnnnnnnnnnnnnnnnnnnnnnnnnnnnnnnnnnnnnnnnnnnnnnnnnnnnnnnnnnnnnnnnnnnnnnnnnnnnnnnnnnnnnnnnnnnnnnnnnnnnnnnnnnnnnnnnnnnnnnnnnnnnnnnnnnnnnnnnnnnnnnnnnnnnnnnnnnnnnnnnnnnnnnnnnnnnnnnnnnnnnnnnnnnnnnnnnnnnnnnnnnnnnnnnnnnnnnnnnnnnnnnnnnnnnnnnnnnnnnnnnnnnnnnnnnnnnnnnnnnnnnnnnnnnnnnnnnnnnnnnnnnnnnnnnnnnnnnnnnnnnnnnnnnnnnnnnnnnnnnnnnnnnnnnnnnnnnnnnnnnnnnnnnnnnnnnnnnnnnnnnnnnnnnnnnnnnnnnnnnnnnnnnnnnnnnnnnnnnnnnnnnnnnnnnnnnnnnnnnnnnnnnnnnnnnnnnnnnnnnnnnnnnnnnnnnnnnnnnnnnnnnnnnnnnnnnnnnnnnnnnnnnnnnnnnnnnnnnnnnnnnnnnnnnnnnnnnnnnnnnnnnnnnnnnnnnnnnnnnnnnnnnnnnnnnnnnnnnnnnnnnnnnnnnnnnnnnnnnnnnnnnnnnnnnnnnnnnnnnnnnnnnnnnnnnnnnnnnnnnnnnnnnnnnnnnnnnnnnnnnnnnnnnnnnnnnnnnnnnnnnnnnnnnnnnnnnnnnnnnnnnnnnnnnnnnnnnnnnnnnnnnnnnnnnnnnnnnnnnnnnnnnnnnnnnnnnnnnnnnnnnnnnnnnnnnnnnnnnnnnnnnnnnnnnnnnnnnnnnnnnnnnnnnnnnnnnnnnnnnnnnnnnnnnnnnnnnnnnnnnnnnnnnnnnnnnnnnnnnnnnnnnnnnnnnnnnnnnnnnnnnnnnnnnnnnnnnnnnnnnnnnnnnnnnnnnnnnnnnnnnnnnnnnnnnnnnnnnnnnnnnnnnnnnnnnnnnnnnnnnnnnnnnnnnnnnnnnnnnnnnnnnnnnnnnnnnnnnnnnnnnnnnnnnnnnnnnnnnnnnnnnnnnnnnnnnnnnnnnnnnnnnnnnnnnnnnnnnnnnnnnnnnnnnnnnnnnnnnnnnnnnnnnnnnnnnnnnnnnnnnnnnnnnnnnnnnnnnnnnnnnnnnnnnnnnnnnnnnnnnnnnnnnnnnnnnnnnnnnnnnnnnnnnnnnnnnnnnnnnnnnnnnnnnnnnnnnnnnnnnnnnnnnnnnnnnnnnnnnnnnnnnnnnnnnnnnnnnnnnnnnnnnnnnnnnnnnnnnnnnnnnnnnnnnnnnnnnnnnnnnnnnnnnnnnnnnnnnnnnnnnnnnnnnnnnnnnnnnnnnnnnnnnnnnnnnnnnnnnnnnnnnnnnnnnnnnnnnnnnnnnnnnnnnnnnnnnnnnnnnnnnnnnnnnnnnnnnnnnnnnnnnnnnnnnnnnnnnnnnnnnnnnnnnnnnnnnnnnnnnnnnnnnnnnnnnnnnnnnnnnnnnnnnnnnnnnnnnnnnnnnnnnnnnnnnnnnnnnnnnnnnnnnnnnnnnnnnnnnnnnnnnnnnnnnnnnnnnnnnnnnnnnnnnnnnnnnnnnnnnnnnnnnnnnnnnnnnnnnnnnnnnnnnnnnnnnnnnnnnnnnnnnnnnnnnnnnnnnnnnnnnnnnnnnnnnnnnnnnnnnnnnnnnnnnnnnnnnnnnnnnnnnnnnnnnnnnnnnnnnnnnnnnnnnnnnnnnnnnnnnnnnnnnnnnnnnnnnnnnnnnnnnnnnnnnnnnnnnnnnnnnnnnnnnnnnnnnnnnnnnnnnnnnnnnnnnnnnnnnnnnnnnnnnnnnnnnnnnnnnnnnnnnnnnnnnnnnnnnnnnnnnnnnnnnnnnnnnnnnnnnnnnnnnnnnnnnnnnnnnnnnnnnnnnnnnnnnnnnnnnnnnnnnnnnnnnnnnnnnnnnnnnnnnnnnnnnnnnnnnnnnnnnnnnnnnnnnnnnnnnnnnnnnnnnnnnnnnnnnnnnnnnnnnnnnnnnnnnnnnnnnnnnnnnnnnnnnnnnnnnnnnnnnnnnnnnnnnnnnnnnnnnnnnnnnnnnnnnnnnnnnnnnnnnnnnnnnnnnnnnnnnnnnnnnnnnnnnnnnnnnnnnnnnnnnnnnnnnnnnnnnnnnnnnnnnnnnnnnnnnnnnnnnnnnnnnnnnnnnnnnnnnnnnnnnnnnnnnnnnnnnnnnnnnnnnnnnnnnnnnnnnnnnnnnnnnnnnnnnnnnnnnnnnnnnnnnnnnnnnnnnnnnnnnnnnnnnnnnnnnnnnnnnnnnnnnnnnnnnnnnnnnnnnnnnnnnnnnnnnnnnnnnnnnnnnnnnnnnnnnnnnnnnnnnnnnnnnnnnnnnnnnnnnnnnnnnnnnnnnnnnnnnnnnnnnnnnnnnnnnnnnnnnnnnnnnnnnnnnnnnnnnnnnnnnnnnnnnnnnnnnnnnnnnnnnnnnnnnnnnnnnnnnnnnnnnnnnnnnnnnnnnnnnnnnnnnnnnnnnnnnnnnnnnnnnnnnnnnnnnnnnnnnnnnnnnnnnnnnnnnnnnnnnnnnnnnnnnnnnnnnnnnnnnnnnnnnnnnnnnnnnnnnnnnnnnnnnnnnnnnnnnnnnnnnnnnnnnnnnnnnnnnnnnnnnnnnnnnnnnnnnnnnnnnnnnnnnnnnnnnnnnnnnnnnnnnnnnnnnnnnnnnnnnnnnnnnnnnnnnnnnnnnnnnnnnnnnnnnnnnnnnnnnnnnnnnnnnnnnnnnnnnnnnnnnnnnnnnnnnnnnnnnnnnnnnnnnnnnnnnnnnnnnnnnnnnnnnnnnnnnnnnnnnnnnnnnnnnnnnnnnnnnnnnnnnnnnnnnnnnnnnnnnnnnnnnnnnnnnnnnnnnnnnnnnnnnnnnnnnnnnnnnnnnnnnnnnnnnnnnnnnnnnnnnnnnnnnnnnnnnnnnnnnnnnnnnnnnnnnnnnnnnnnnnnnnnnnnnnnnnnnnnnnnnnnnnnnnnnnnnnnnnnnnnnnnnnnnnnnnnnnnnnnnnnnnnnnnnnnnnnnnnnnnnnnnnnnnnnnnnnnnnnnnnnnnnnnnnnnnnnnnnnnnnnnnnnnnnnnnnnnnnnnnnnnnnnnnnnnnnnnnnnnnnnnnnnnnnnnnnnnnnnnnnnnnnnnnnnnnnnnnnnnnnnnnnnnnnnnnnnnnnnnnnnnnnnnnnnnnnnnnnnnnnnnnnnnnnnnnnnnnnnnnnnnnnnnnnnnnnnnnnnnnnnnnnnnnnnnnnnnnnnnnnnnnnnnnnnnnnnnnnnnnnnnnnnnnnnnnnnnnnnnnnnnnnnnnnnnnnnnnnnnnnnnnnnnnnnnnnnnnnnnnnnnnnnnnnnnnnnnnnnnnnnnnnnnnnnnnnnnnnnnnnnnnnnnnnnnnnnnnnnnnnnnnnnnnnnnnnnnnnnnnnnnnnnnnnnnnnnnnnnnnnnnnnnnnnnnnnnnnnnnnnnnnnnnnnnnnnnnnnnnnnnnnnnnnnnnnnnnnnnnnnnnnnnnnnnnnnnnnnnnnnnnnnnnnnnnnnnnnnnnnnnnnnnnnnnnnnnnnnnnnnnnnnnnnnnnnnnnnnnnnnnnnnnnnnnnnnnnnnnnnnnnnnnnnnnnnnnnnnnnnnnnnnnnnnnnnnnnnnnnnnnnnnnnnnnnnnnnnnnnnnnnnnnnnnnnnnnnnnnnnnnnnnnnnnnnnnnnnnnnnnnnnnnnnnnnnnnnnnnnnnnnnnnnnnnnnnnnnnnnnnnnnnnnnnnnnnnnnnnnnnnnnnnnnnnnnnnnnnnnnnnnnnnnnnnnnnnnnnnnnnnnnnnnnnnnnnnnnnnnnnnnnnnnnnnnnnnnnnnnnnnnnnnnnnnnnnnnnnnnnnnnnnnnnnnnnnnnnnnnnnnnnnnnnnnnnnnnnnnnnnnnnnnnnnnnnnnnnnnnnnnnnnnnnnnnnnnnnnnnnnnnnnnnnnnnnnnnnnnnnnnnnnnnnnnnnnnnnnnnnnnnnnnnnnnnnnnnnnnnnnnnnnnnnnnnnnnnnnnnnnnnnnnnnnnnnnnnnnnnnnnnnnnnnnnnnnnnnnnnnnnnnnnnnnnnnnnnnnnnnnnnnnnnnnnnnnnnnnnnnnnnnnnnnnnnnnnnnnnnnnnnnnnnnnnnnnnnnnnnnnnnnnnnnnnnnnnnnnnnnnnnnnnnnnnnnnnnnnnnnnnnnnnnnnnnnnnnnnnnnnnnnnnnnnnnnnnnnnnnnnnnnnnnnnnnnnnnnnnnnnnnnnnnnnnnnnnnnnnnnnnnnnnnnnnnnnnnnnnnnnnnnnnnnnnnnnnnnnnnnnnnnnnnnnnnnnnnnnnnnnnnnnnnnnnnnnnnnnnnnnnnnnnnnnnnnnnnnnnnnnnnnnnnnnnnnnnnnnnnnnnnnnnnnnnnnnnnnnnnnnnnnnnnnnnnnnnnnnnnnnnnnnnnnnnnnnnnnnnnnnnnnnnnnnnnnnnnnnnnnnnnnnnnnnnnnnnnnnnnnnnnnnnnnnnnnnnnnnnnnnnnnnnnnnnnnnnnnnnnnnnnnnnnnnnnnnnnnnnnnnnnnnnnnnnnnnnnnnnnnnnnnnnnnnnnnnnnnnnnnnnnnnnnnnnnnnnnnnnnnnnnnnnnnnnnnnnnnnnnnnnnnnnnnnnnnnnnnnnnnnnnnnnnnnnnnnnnnnnnnnnnnnnnnnnnnnnnnnnnnnnnnnnnnnnnnnnnnnnnnnnnnnnnnnnnnnnnnnnnnnnnnnnnnnnnnnnnnnnnnnnnnnnnnnnnnnnnnnnnnnnnnnnnnnnnnnnnnnnnnnnnnnnnnnnnnnnnnnnnnnnnnnnnnnnnnnnnnnnnnnnnnnnnnnnnnnnnnnnnnnnnnnnnnnnnnnnnnnnnnnnnnnnnnnnnnnnnnnnnnnnnnnnnnnnnnnnnnnnnnnnnnnnnnnnnnnnnnnnnnnnnnnnnnnnnnnnnnnnnnnnnnnnnnnnnnnnnnnnnnnnnnnnnnnnnnnnnnnnnnnnnnnnnnnnnnnnnnnnnnnnnnnnnnnnnnnnnnnnnnnnnnnnnnnnnnnnnnnnnnnnnnnnnnnnnnnnnnnnnnnnnnnnnnnnnnnnnnnnnnnnnnnnnnnnnnnnnnnnnnnnnnnnnnnnnnnnnnnnnnnnnnnnnnnnnnnnnnnnnnnnnnnnnnnnnnnnnnnnnnnnnnnnnnnnnnnnnnnnnnnnnnnnnnnnnnnnnnnnnnnnnnnnnnnnnnnnnnnnnnnnnnnnnnnnnnnnnnnnnnnnnnnnnnnnnnnnnnnnnnnnnnnnnnnnnnnnnnnnnnnnnnnnnnnnnnnnnnnnnnnnnnnnnnnnnnnnnnnnnnnnnnnnnnnnnnnnnnnnnnnnnnnnnnnnnnnnnnnnnnnnnnnnnnnnnnnnnnnnnnnnnnnnnnnnnnnnnnnnnnnnnnnnnnnnnnnnnnnnnnnnnnnnnnnnnnnnnnnnnnnnnnnnnnnnnnnnnnnnnnnnnnnnnnnnnnnnnnnnnnnnnnnnnnnnnnnnnnnnnnnnnnnnnnnnnnnnnnnnnnnnnnnnnnnnnnnnnnnnnnnnnnnnnnnnnnnnnnnnnnnnnnnnnnnnnnnnnnnnnnnnnnnnnnnnnnnnnnnnnnnnnnnnnnnnnnnnnnnnnnnnnnnnnnnnnnnnnnnnnnnnnnnnnnnnnnnnnnnnnnnnnnnnnnnnnnnnnnnnnnnnnnnnnnnnnnnnnnnnnnnnnnnnnnnnnnnnnnnnnnnnnnnnnnnnnnnnnnnnnnnnnnnnnnnnnnnnnnnnnnnnnnnnnnnnnnnnnnnnnnnnnnnnnnnnnnnnnnnnnnnnnnnnnnnnnnnnnnnnnnnnnnnnnnnnnnnnnnnnnnnnnnnnnnnnnnnnnnnnnnnnnnnnnnnnnnnnnnnnnnnnnnnnnnnnnnnnnnnnnnnnnnnnnnnnnnnnnnnnnnnnnnnnnnnnnnnnnnnnnnnnnnnnnnnnnnnnnnnnnnnnnnnnnnnnnnnnnnnnnnnnnnnnnnnnnnnnnnnnnnnnnnnnnnnnnnnnnnnnnnnnnnnnnnnnnnnnnnnnnnnnnnnnnnnnnnnnnnnnnnnnnnnnnnnnnnnnnnnnnnnnnnnnnnnnnnnnnnnnnnnnnnnnnnnnnnnnnnnnnnnnnnnnnnnnnnnnnnnnnnnnnnnnnnnnnnnnnnnnnnnnnnnnnnnnnnnnnnnnnnnnnnnnnnnnnnnnnnnnnnnnnnnnnnnnnnnnnnnnnnnnnnnnnnnnnnnnnnnnnnnnnnnnnnnnnnnnnnnnnnnnnnnnnnnnnnnnnnnnnnnnnnnnnnnnnnnnnnnnnnnnnnnnnnnnnnnnnnnnnnnnnnnnnnnnnnnnnnnnnnnnnnnnnnnnnnnnnnnnnnnnnnnnnnnnnnnnnnnnnnnnnnnnnnnnnnnnnnnnnnnnnnnnnnnnnnnnnnnnnnnnnnnnnnnnnnnnnnnnnnnnnnnnnnnnnnnnnnnnnnnnnnnnnnnnnnnnnnnnnnnnnnnnnnnnnnnnnnnnnnnnnnnnnnnnnnnnnnnnnnnnnnnnnnnnnnnnnnnnnnnnnnnnnnnnnnnnnnnnnnnnnnnnnnnnnnnnnnnnnnnnnnnnnnnnnnnnnnnnnnnnnnnnnnnnnnnnnnnnnnnnnnnnnnnnnnnnnnnnnnnnnnnnnnnnnnnnnnnnnnnnnnnnnnnnnnnnnnnnnnnnnnnnnnnnnnnnnnnnnnnnnnnnnnnnnnnnnnnnnnnnnnnnnnnnnnnnnnnnnnnnnnnnnnnnnnnnnnnnnnnnnnnnnnnnnnnnnnnnnnnnnnnnnnnnnnnnnnnnnnnnnnnnnnnnnnnnnnnnnnnnnnnnnnnnnnnnnnnnnnnnnnnnnnnnnnnnnnnnnnnnnnnnnnnnnnnnnnnnnnnnnnnnnnnnnnnnnnnnnnnnnnnnnnnnnnnnnnnnnnnnnnnnnnnnnnnnnnnnnnnnnnnnnnnnnnnnnnnnnnnnnnnnnnnnnnnnnnnnnnnnnnnnnnnnnnnnnnnnnnnnnnnnnnnnnnnnnnnnnnnnnnnnnnnnnnnnnnnnnnnnnnnnnnnnnnnnnnnnnnnnnnnnnnnnnnnnnnnnnnnnnnnnnnnnnnnnnnnnnnnnnnnnnnnnnnnnnnnnnnnnnnnnnnnnnnnnnnnnnnnnnnnnnnnnnnnnnnnnnnnnnnnnnnnnnnnnnnnnnnnnnnnnnnnnnnnnnnnnnnnnnnnnnnnnnnnnnnnnnnnnnnnnnnnnnnnnnnnnnnnnnnnnnnnnnnnnnnnnnnnnnnnnnnnnnnnnnnnnnnnnnnnnnnnnnnnnnnnnnnnnnnnnnnnnnnnnnnnnnnnnnnnnnnnnnnnnnnnnnnnnnnnnnnnnnnnnnnnnnnnnnnnnnnnnnnnnnnnnnnnnnnnnnnnnnnnnnnnnnnnnnnnnnnnnnnnnnnnnnnnnnnnnnnnnnnnnnnnnnnnnnnnnnnnnnnnnnnnnnnnnnnnnnnnnnnnnnnnnnnnnnnnnnnnnnnnnnnnnnnnnnnnnnnnnnnnnnnnnnnnnnnnnnnnnnnnnnnnnnnnnnnnnnnnnnnnnnnnnnnnnnnnnnnnnnnnnnnnnnnnnnnnnnnnnnnnnnnnnnnnnnnnnnnnnnnnnnnnnnnnnnnnnnnnnnnnnnnnnnnnnnnnnnnnnnnnnnnnnnnnnnnnnnnnnnnnnnnnnnnnnnnnnnnnnnnnnnnnnnnnnnnnnnnnnnnnnnnnnnnnnnnnnnnnnnnnnnnnnnnnnnnnnnnnnnnnnnnnnnnnnnnnnnnnnnnnnnnnnnnnnnnnnnnnnnnnnnnnnnnnnnnnnnnnnnnnnnnnnnnnnnnnnnnnnnnnnnnnnnnnnnnnnnnnnnnnnnnnnnnnnnnnnnnnnnnnnnnnnnnnnnnnnnnnnnnnnnnnnnnnnnnnnnnnnnnnnnnnnnnnnnnnnnnnnnnnnnnnnnnnnnnnnnnnnnnnnnnnnnnnnnnnnnnnnnnnnnnnnnnnnnnnnnnnnnnnnnnnnnnnnnnnnnnnnnnnnnnnnnnnnnnnnnnnnnnnnnnnnnnnnnnnnnnnnnnnnnnnnnnnnnnnnnnnnnnnnnnnnnnnnnnnnnnnnnnnnnnnnnnnnnnnnnnnnnnnnnnnnnnnnnnnnnnnnnnnnnnnnnnnnnnnnnnnnnnnnnnnnnnnnnnnnnnnnnnnnnnnnnnnnnnnnnnnnnnnnnnnnnnnnnnnnnnnnnnnnnnnnnnnnnnnnnnnnnnnnnnnnnnnnnnnnnnnnnnnnnnnnnnnnnnnnnnnnnnnnnnnnnnnnnnnnnnnnnnnnnnnnnnnnnnnnnnnnnnnnnnnnnnnnnnnnnnnnnnnnnnnnnnnnnnnnnnnnnnnnnnnnnnnnnnnnnnnnnnnnnnnnnnnnnnnnnnnnnnnnnnnnnnnnnnnnnnnnnnnnnnnnnnnnnnnnnnnnnnnnnnnnnnnnnnnnnnnnnnnnnnnnnnnnnnnnnnnnnnnnnnnnnnnnnnnnnnnnnnnnnnnnnnnnnnnnnnnnnnnnnnnnnnnnnnnnnnnnnnnnnnnnnnnnnnnnnnnnnnnnnnnnnnnnnnnnnnnnnnnnnnnnnnnnnnnnnnnnnnnnnnnnnnnnnnnnnnnnnnnnnnnnnnnnnnnnnnnnnnnnnnnnnnnnnnnnnnnnnnnnnnnnnnnnnnnnnnnnnnnnnnnnnnnnnnnnnnnnnnnnnnnnnnnnnnnnnnnnnnnnnnnnnnnnnnnnnnnnnnnnnnnnnnnnnnnnnnnnnnnnnnnnnnnnnnnnnnnnnnnnnnnnnnnnnnnnnnnnnnnnnnnnnnnnnnnnnnnnnnnnnnnnnnnnnnnnnnnnnnnnnnnnnnnnnnnnnnnnnnnnnnnnnnnnnnnnnnnnnnnnnnnnnnnnnnnnnnnnnnnnnnnnnnnnnnnnnnnnnnnnnnnnnnnnnnnnnnnnnnnnnnnnnnnnnnnnnnnnnnnnnnnnnnnnnnnnnnnnnnnnnnnnnnnnnnnnnnnnnnnnnnnnnnnnnnnnnnnnnnnnnnnnnnnnnnnnnnnnnnnnnnnnnnnnnnnnnnnnnnnnnnnnnnnnnnnnnnnnnnnnnnnnnnnnnnnnnnnnnnnnnnnnnnnnnnnnnnnnnnnnnnnnnnnnnnnnnnnnnnnnnnnnnnnnnnnnnnnnnnnnnnnnnnnnnnnnnnnnnnnnnnnnnnnnnnnnnnnnnnnnnnnnnnnnnnnnnnnnnnnnnnnnnnnnnnnnnnnnnnnnnnnnnnnnnnnnnnnnnnnnnnnnnnnnnnnnnnnnnnnnnnnnnnnnnnnnnnnnnnnnnnnnnnnnnnnnnnnnnnnnnnnnnnnnnnnnnnnnnnnnnnnnnnnnnnnnnnnnnnnnnnnnnnnnnnnnnnnnnnnnnnnnnnnnnnnnnnnnnnnnnnnnnnnnnnnnnnnnnnnnnnnnnnnnnnnnnnnnnnnnnnnnnnnnnnnnnnnnnnnnnnnnnnnnnnnnnnnnnnnnnnnnnnnnnnnnnnnnnnnnnnnnnnnnnnnnnnnnnnnnnnnnnnnnnnnnnnnnnnnnnnnnnnnnnnnnnnnnnnnnnnnnnnnnnnnnnnnnnnnnnnnnnnnnnnnnnnnnnnnnnnnnnnnnnnnnnnnnnnnnnnnnnnnnnnnnnnnnnnnnnnnnnnnnnnnnnnnnnnnnnnnnnnnnnnnnnnnnnnnnnnnnnnnnnnnnnnnnnnnnnnnnnnnnnnnnnnnnnnnnnnnnnnnnnnnnnnnnnnnnnnnnnnnnnnnnnnnnnnnnnnnnnnnnnnnnnnnnnnnnnnnnnnnnnnnnnnnnnnnnnnnnnnnnnnnnnnnnnnnnnnnnnnnnnnnnnnnnnnnnnnnnnnnnnnnnnnnnnnnnnnnnnnnnnnnnnnnnnnnnnnnnnnnnnnnnnnnnnnnnnnnnnnnnnnnnnnnnnnnnnnnnnnnnnnnnnnnnnnnnnnnnnnnnnnnnnnnnnnnnnnnnnnnnnnnnnnnnnnnnnnnnnnnnnnnnnnnnnnnnnnnnnnnnnnnnnnnnnnnnnnnnnnnnnnnnnnnnnnnnnnnnnnnnnnnnnnnnnnnnnnnnnnnnnnnnnnnnnnnnnnnnnnnnnnnnnnnnnnnnnnnnnnnnnnnnnnnnnnnnnnnnnnnnnnnnnnnnnnnnnnnnnnnnnnnnnnnnnnnnnnnnnnnnnnnnnnnnnnnnnnnnnnnnnnnnnnnnnnnnnnnnnnnnnnnnnnnnnnnnnnnnnnnnnnnnnnnnnnnnnnnnnnnnnnnnnnnnnnnnnnnnnnnnnnnnnnnnnnnnnnnnnnnnnnnnnnnnnnnnnnnnnnnnnnnnnnnnnnnnnnnnnnnnnnnnnnnnnnnnnnnnnnnnnnnnnnnnnnnnnnnnnnnnnnnnnnnnnnnnnnnnnnnnnnnnnnnnnnnnnnnnnnnnnnnnnnnnnnnnnnnnnnnnnnnnnnnnnnnnnnnnnnnnnnnnnnnnnnnnnnnnnnnnnnnnnnnnnnnnnnnnnnnnnnnnnnnnnnnnnnnnnnnnnnnnnnnnnnnnnnnnnnnnnnnnnnnnnnnnnnnnnnnnnnnnnnnnnnnnnnnnnnnnnnnnnnnnnnnnnnnnnnnnnnnnnnnnnnnnnnnnnnnnnnnnnnnnnnnnnnnnnnnnnnnnnnnnnnnnnnnnnnnnnnnnnnnnnnnnnnnnnnnnnnnnnnnnnnnnnnnnnnnnnnnnnnnnnnnnnnnnnnnnnnnnnnnnnnnnnnnnnnnnnnnnnnnnnnnnnnnnnnnnnnnnnnnnnnnnnnnnnnnnnnnnnnnnnnnnnnnnnnnnnnnnnnnnnnnnnnnnnnnnnnnnnnnnnnnnnnnnnnnnnnnnnnnnnnnnnnnnnnnnnnnnnnnnnnnnnnnnnnnnnnnnnnnnnnnnnnnnnnnnnnnnnnnnnnnnnnnnnnnnnnnnnnnnnnnnnnnnnnnnnnnnnnnnnnnnnnnnnnnnnnnnnnnnnnnnnnnnnnnnnnnnnnnnnnnnnnnnnnnnnnnnnnnnnnnnnnnnnnnnnnnnnnnnnnnnnnnnnnnnnnnnnnnnnnnnnnnnnnnnnnnnnnnnnnnnnnnnnnnnnnnnnnnnnnnnnnnnnnnnnnnnnnnnnnnnnnnnnnnnnnnnnnnnnnnnnnnnnnnnnnnnnnnnnnnnnnnnnnnnnnnnnnnnnnnnnnnnnnnnnnnnnnnnnnnnnnnnnnnnnnnnnnnnnnnnnnnnnnnnnnnnnnnnnnnnnnnnnnnnnnnnnnnnnnnnnnnnnnnnnnnnnnnnnnnnnnnnnnnnnnnnnnnnnnnnnnnnnnnnnnnnnnnnnnnnnnnnnnnnnnnnnnnnnnnnnnnnnnnnnnnnnnnnnnnnnnnnnnnnnnnnnnnnnnnnnnnnnnnnnnnnnnnnnnnnnnnnnnnnnnnnnnnnnnnnnnnnnnnnnnnnnnnnnnnnnnnnnnnnnnnnnnnnnnnnnnnnnnnnnnnnnnnnnnnnnnnnnnnnnnnnnnnnnnnnnnnnnnnnnnnnnnnnnnnnnnnnnnnnnnnnnnnnnnnnnnnnnnnnnnnnnnnnnnnnnnnnnnnnnnnnnnnnnnnnnnnnnnnnnnnnnnnnnnnnnnnnnnnnnnnnnnnnnnnnnnnnnnnnnnnnnnnnnnnnnnnnnnnnnnnnnnnnnnnnnnnnnnnnnnnnnnnnnnnnnnnnnnnnnnnnnnnnnnnnnnnnnnnnnnnnnnnnnnnnnnnnnnnnnnnnnnnnnnnnnnnnnnnnnnnnnnnnnnnnnnnnnnnnnnnnnnnnnnnnnnnnnnnnnnnnnnnnnnnnnnnnnnnnnnnnnnnnnnnnnnnnnnnnnnnnnnnnnnnnnnnnnnnnnnnnnnnnnnnnnnnnnnnnnnnnnnnnnnnnnnnnnnnnnnnnnnnnnnnnnnnnnnnnnnnnnnnnnnnnnnnnnnnnnnnnnnnnnnnnnnnnnnnnnnnnnnnnnnnnnnnnnnnnnnnnnnnnnnnnnnnnnnnnnnnnnnnnnnnnnnnnnnnnnnnnnnnnnnnnnnnnnnnnnnnnnnnnnnnnnnnnnnnnnnnnnnnnnnnnnnnnnnnnnnnnnnnnnnnnnnnnnnnnnnnnnnnnnnnnnnnnnnnnnnnnnnnnnnnnnnnnnnnnnnnnnnnnnnnnnnnnnnnnnnnnnnnnnnnnnnnnnnnnnnnnnnnnnnnnnnnnnnnnnnnnnnnnnnnnnnnnnnnnnnnnnnnnnnnnnnnnnnnnnnnnnnnnnnnnnnnnnnnnnnnnnnnnnnnnnnnnnnnnnnnnnnnnnnnnnnnnnnnnnnnnnnnnnnnnnnnnnnnnnnnnnnnnnnnnnnnnnnnnnnnnnnnnnnnnnnnnnnnnnnnnnnnnnnnnnnnnnnnnnnnnnnnnnnnnnnnnnnnnnnnnnnnnnnnnnnnnnnnnnnnnnnnnnnnnnnnnnnnnnnnnnnnnnnnnnnnnnnnnnnnnnnnnnnnnnnnnnnnnnnnnnnnnnnnnnnnnnnnnnnnnnnnnnnnnnnnnnnnnnnnnnnnnnnnnnnnnnnnnnnnnnnnnnnnnnnnnnnnnnnnnnnnnnnnnnnnnnnnnnnnnnnnnnnnnnnnnnnnnnnnnnnnnnnnnnnnnnnnnnnnnnnnnnnnnnnnnnnnnnnnnnnnnnnnnnnnnnnnnnnnnnnnnnnnnnnnnnnnnnnnnnnnnnnnnnnnnnnnnnnnnnnnnnnnnnnnnnnnnnnnnnnnnnnnnnnnnnnnnnnnnnnnnnnnnnnnnnnnnnnnnnnnnnnnnnnnnnnnnnnnnnnnnnnnnnnnnnnnnnnnnnnnnnnnnnnnnnnnnnnnnnnnnnnnnnnnnnnnnnnnnnnnnnnnnnnnnnnnnnnnnnnnnnnnnnnnnnnnnnnnnnnnnnnnnnnnnnnnnnnnnnnnnnnnnnnnnnnnnnnnnnnnnnnnnnnnnnnnnnnnnnnnnnnnnnnnnnnnnnnnnnnnnnnnnnnnnnnnnnnnnnnnnnnnnnnnnnnnnnnnnnnnnnnnnnnnnnnnnnnnnnnnnnnnnnnnnnnnnnnnnnnnnnnnnnnnnnnnnnnnnnnnnnnnnnnnnnnnnnnnnnnnnnnnnnnnnnnnnnnnnnnnnnnnnnnnnnnnnnnnnnnnnnnnnnnnnnnnnnnnnnnnnnnnnnnnnnnnnnnnnnnnnnnnnnnnnnnnnnnnnnnnnnnnnnnnnnnnnnnnnnnnnnnnnnnnnnnnnnnnnnnnnnnnnnnnnnnnnnnnnnnnnnnnnnnnnnnnnnnnnnnnnnnnnnnnnnnnnnnnnnnnnnnnnnnnnnnnnnnnnnnnnnnnnnnnnnnnnnnnnnnnnnnnnnnnnnnnnnnnnnnnnnnnnnnnnnnnnnnnnnnnnnnnnnnnnnnnnnnnnnnnnnnnnnnnnnnnnnnnnnnnnnnnnnnnnnnnnnnnnnnnnnnnnnnnnnnnnnnnnnnnnnnnnnnnnnnnnnnnnnnnnnnnnnnnnnnnnnnnnnnnnnnnnnnnnnnnnnnnnnnnnnnnnnnnnnnnnnnnnnnnnnnnnnnnnnnnnnnnnnnnnnnnnnnnnnnnnnnnnnnnnnnnnnnnnnnnnnnnnnnnnnnnnnnnnnnnnnnnnnnnnnnnnnnnnnnnnnnnnnnnnnnnnnnnnnnnnnnnnnnnnnnnnnnnnnnnnnnnnnnnnnnnnnnnnnnnnnnnnnnnnnnnnnnnnnnnnnnnnnnnnnnnnnnnnnnnnnnnnnnnnnnnnnnnnnnnnnnnnnnnnnnnnnnnnnnnnnnnnnnnnnnnnnnnnnnnnnnnnnnnnnnnnnnnnnnnnnnnnnnnnnnnnnnnnnnnnnnnnnnnnnnnnnnnnnnnnnnnnnnnnnnnnnnnnnnnnnnnnnnnnnnnnnnnnnnnnnnnnnnnnnnnnnnnnnnnnnnnnnnnnnnnnnnnnnnnnnnnnnnnnnnnnnnnnnnnnnnnnnnnnnnnnnnnnnnnnnnnnnnnnnnnnnnnnnnnnnnnnnnnnnnnnnnnnnnnnnnnnnnnnnnnnnnnnnnnnnnnnnnnnnnnnnnnnnnnnnnnnnnnnnnnnnnnnnnnnnnnnnnnnnnnnnnnnnnnnnnnnnnnnnnnnnnnnnnnnnnnnnnnnnnnnnnnnnnnnnnnnnnnnnnnnnnnnnnnnnnnnnnnnnnnnnnnnnnnnnnnnnnnnnnnnnnnnnnnnnnnnnnnnnnnnnnnnnnnnnnnnnnnnnnnnnnnnnnnnnnnnnnnnnnnnnnnnnnnnnnnnnnnnnnnnnnnnnnnnnnnnnnnnnnnnnnnnnnnnnnnnnnnnnnnnnnnnnnnnnnnnnnnnnnnnnnnnnnnnnnnnnnnnnnnnnnnnnnnnnnnnnnnnnnnnnnnnnnnnnnnnnnnnnnnnnnnnnnnnnnnnnnnnnnnnnnnnnnnnnnnnnnnnnnnnnnnnnnnnnnnnnnnnnnnnnnnnnnnnnnnnnnnnnnnnnnnnnnnnnnnnnnnnnnnnnnnnnnnnnnnnnnnnnnnnnnnnnnnnnnnnnnnnnnnnnnnnnnnnnnnnnnnnnnnnnnnnnnnnnnnnnnnnnnnnnnnnnnnnnnnnnnnnnnnnnnnnnnnnnnnnnnnnnnnnnnnnnnnnnnnnnnnnnnnnnnnnnnnnnnnnnnnnnnnnnnnnnnnnnnnnnnnnnnnnnnnnnnnnnnnnnnnnnnnnnnnnnnnnnnnnnnnnnnnnnnnnnnnnnnnnnnnnnnnnnnnnnnnnnnnnnnnnnnnnnnnnnnnnnnnnnnnnnnnnnnnnnnnnnnnnnnnnnnnnnnnnnnnnnnnnnnnnnnnnnnnnnnnnnnnnnnnnnnnnnnnnnnnnnnnnnnnnnnnnnnnnnnnnnnnnnnnnnnnnnnnnnnnnnnnnnnnnnnnnnnnnnnnnnnnnnnnnnnnnnnnnnnnnnnnnnnnnnnnnnnnnnnnnnnnnnnnnnnnnnnnnnnnnnnnnnnnnnnnnnnnnnnnnnnnnnnnnnnnnnnnnnnnnnnnnnnnnnnnnnnnnnnnnnnnnnnnnnnnnnnnnnnnnnnnnnnnnnnnnnnnnnnnnnnnnnnnnnnnnnnnnnnnnnnnnnnnnnnnnnnnnnnnnnnnnnnnnnnnnnnnnnnnnnnnnnnnnnnnnnnnnnnnnnnnnnnnnnnnnnnnnnnnnnnnnnnnnnnnnnnnnnnnnnnnnnnnnnnnnnnnnnnnnnnnnnnnnnnnnnnnnnnnnnnnnnnnnnnnnnnnnnnnnnnnnnnnnnnnnnnnnnnnnnnnnnnnnnnnnnnnnnnnnnnnnnnnnnnnnnnnnnnnnnnnnnnnnnnnnnnnnnnnnnnnnnnnnnnnnnnnnnnnnnnnnnnnnnnnnnnnnnnnnnnnnnnnnnnnnnnnnnnnnnnnnnnnnnnnnnnnnnnnnnnnnnnnnnnnnnnnnnnnnnnnnnnnnnnnnnnnnnnnnnnnnnnnnnnnnnnnnnnnnnnnnnnnnnnnnnnnnnnnnnnnnnnnnnnnnnnnnnnnnnnnnnnnnnnnnnnnnnnnnnnnnnnnnnnnnnnnnnnnnnnnnnnnnnnnnnnnnnnnnnnnnnnnnnnnnnnnnnnnnnnnnnnnnnnnnnnnnnnnnnnnnnnnnnnnnnnnnnnnnnnnnnnnnnnnnnnnnnnnnnnnnnnnnnnnnnnnnnnnnnnnnnnnnnnnnnnnnnnnnnnnnnnnnnnnnnnnnnnnnnnnnnnnnnnnnnnnnnnnnnnnnnnnnnnnnnnnnnnnnnnnnnnnnnnnnnnnnnnnnnnnnnnnnnnnnnnnnnnnnnnnnnnnnnnnnnnnnnnnnnnnnnnnnnnnnnnnnnnnnnnnnnnnnnnnnnnnnnnnnnnnnnnnnnnnnnnnnnnnnnnnnnnnnnnnnnnnnnnnnnnnnnnnnnnnnnnnnnnnnnnnnnnnnnnnnnnnnnnnnnnnnnnnnnnnnnnnnnnnnnnnnnnnnnnnnnnnnnnnnnnnnnnnnnnnnnnnnnnnnnnnnnnnnnnnnnnnnnnnnnnnnnnnnnnnnnnnnnnnnnnnnnnnnnnnnnnnnnnnnnnnnnnnnnnnnnnnnnnnnnnnnnnnnnnnnnnnnnnnnnnnnnnnnnnnnnnnnnnnnnnnnnnnnnnnnnnnnnnnnnnnnnnnnnnnnnnnnnnnnnnnnnnnnnnnnnnnnnnnnnnnnnnnnnnnnnnnnnnnnnnnnnnnnnnnnnnnnnnnnnnnnnnnnnnnnnnnnnnnnnnnnnnnnnnnnnnnnnnnnnnnnnnnnnnnnnnnnnnnnnnnnnnnnnnnnnnnnnnnnnnnnnnnnnnnnnnnnnnnnnnnnnnnnnnnnnnnnnnnnnnnnnnnnnnnnnnnnnnnnnnnnnnnnnnnnnnnnnnnnnnnnnnnnnnnnnnnnnnnnnnnnnnnnnnnnnnnnnnnnnnnnnnnnnnnnnnnnnnnnnnnnnnnnnnnnnnnnnnnnnnnnnnnnnnnnnnnnnnnnnnnnnnnnnnnnnnnnnnnnnnnnnnnnnnnnnnnnnnnnnnnnnnnnnnnnnnnnnnnnnnnnnnnnnnnnnnnnnnnnnnnnnnnnnnnnnnnnnnnnnnnnnnnnnnnnnnnnnnnnnnnnnnnnnnnnnnnnnnnnnnnnnnnnnnnnnnnnnnnnnnnnnnnnnnnnnnnnnnnnnnnnnnnnnnnnnnnnnnnnnnnnnnnnnnnnnnnnnnnnnnnnnnnnnnnnnnnnnnnnnnnnnnnnnnnnnnnnnnnnnnnnnnnnnnnnnnnnnnnnnnnnnnnnnnnnnnnnnnnnnnnnnnnnnnnnnnnnnnnnnnnnnnnnnnnnnnnnnnnnnnnnnnnnnnnnnnnnnnnnnnnnnnnnnnnnnnnnnnnnnnnnnnnnnnnnnnnnnnnnnnnnnnnnnnnnnnnnnnnnnnnnnnnnnnnnnnnnnnnnnnnnnnnnnnnnnnnnnnnnnnnnnnnnnnnnnnnnnnnnnnnnnnnnnnnnnnnnnnnnnnnnnnnnnnnnnnnnnnnnnnnnnnnnnnnnnnnnnnnnnnnnnnnnnnnnnnnnnnnnnnnnnnnnnnnnnnnnnnnnnnnnnnnnnnnnnnnnnnnnnnnnnnnnnnnnnnnnnnnnnnnnnnnnnnnnnnnnnnnnnnnnnnnnnnnnnnnnnnnnnnnnnnnnnnnnnnnnnnnnnnnnnnnnnnnnnnnnnnnnnnnnnnnnnnnnnnnnnnnnnnnnnnnnnnnnnnnnnnnnnnnnnnnnnnnnnnnnnnnnnnnnnnnnnnnnnnnnnnnnnnnnnnnnnnnnnnnnnnnnnnnnnnnnnnnnnnnnnnnnnnnnnnnnnnnnnnnnnnnnnnnnnnnnnnnnnnnnnnnnnnnnnnnnnnnnnnnnnnnnnnnnnnnnnnnnnnnnnnnnnnnnnnnnnnnnnnnnnnnnnnnnnnnnnnnnnnnnnnnnnnnnnnnnnnnnnnnnnnnnnnnnnnnnnnnnnnnnnnnnnnnnnnnnnnnnnnnnnnnnnnnnnnnnnnnnnnnnnnnnnnnnnnnnnnnnnnnnnnnnnnnnnnnnnnnnnnnnnnnnnnnnnnnnnnnnnnnnnnnnnnnnnnnnnnnnnnnnnnnnnnnnnnnnnnnnnnnnnnnnnnnnnnnnnnnnnnnnnnnnnnnnnnnnnnnnnnnnnnnnnnnnnnnnnnnnnnnnnnnnnnnnnnnnnnnnnnnnnnnnnnnnnnnnnnnnnnnnnnnnnnnnnnnnnnnnnnnnnnnnnnnnnnnnnnnnnnnnnnnnnnnnnnnnnnnnnnnnnnnnnnnnnnnnnnnnnnnnnnnnnnnnnnnnnnnnnnnnnnnnnnnnnnnnnnnnnnnnnnnnnnnnnnnnnnnnnnnnnnnnnnnnnnnnnnnnnnnnnnnnnnnnnnnnnnnnnnnnnnnnnnnnnnnnnnnnnnnnnnnnnnnnnnnnnnnnnnnnnnnnnnnnnnnnnnnnnnnnnnnnnnnnnnnnnnnnnnnnnnnnnnnnnnnnnnnnnnnnnnnnnnnnnnnnnnnnnnnnnnnnnnnnnnnnnnnnnnnnnnnnnnnnnnnnnnnnnnnnnnnnnnnnnnnnnnnnnnnnnnnnnnnnnnnnnnnnnnnnnnnnnnnnnnnnnnnnnnnnnnnnnnnnnnnnnnnnnnnnnnnnnnnnnnnnnnnnnnnnnnnnnnnnnnnnnnnnnnnnnnnnnnnnnnnnnnnnnnnnnnnnnnnnnnnnnnnnnnnnnnnnnnnnnnnnnnnnnnnnnnnnnnnnnnnnnnnnnnnnnnnnnnnnnnnnnnnnnnnnnnnnnnnnnnnnnnnnnnnnnnnnnnnnnnnnnnnnnnnnnnnnnnnnnnnnnnnnnnnnnnnnnnnnnnnnnnnnnnnnnnnnnnnnnnnnnnnnnnnnnnnnnnnnnnnnnnnnnnnnnnnnnnnnnnnnnnnnnnnnnnnnnnnnnnnnnnnnnnnnnnnnnnnnnnnnnnnnnnnnnnnnnnnnnnnnnnnnnnnnnnnnnnnnnnnnnnnnnnnnnnnnnnnnnnnnnnnnnnnnnnnnnnnnnnnnnnnnnnnnnnnnnnnnnnnnnnnnnnnnnnnnnnnnnnnnnnnnnnnnnnnnnnnnnnnnnnnnnnnnnnnnnnnnnnnnnnnnnnnnnnnnnnnnnnnnnnnnnnnnnnnnnnnnnnnnnnnnnnnnnnnnnnnnnnnnnnnnnnnnnnnnnnnnnnnnnnnnnnnnnnnnnnnnnnnnnnnnnnnnnnnnnnnnnnnnnnnnnnnnnnnnnnnnnnnnnnnnnnnnnnnnnnnnnnnnnnnnnnnnnnnnnnnnnnnnnnnnnnnnnnnnnnnnnnnnnnnnnnnnnnnnnnnnnnnnnnnnnnnnnnnnnnnnnnnnnnnnnnnnnnnnnnnnnnnnnnnnnnnnnnnnnnnnnnnnnnnnnnnnnnnnnnnnnnnnnnnnnnnnnnnnnnnnnnnnnnnnnnnnnnnnnnnnnnnnnnnnnnnnnnnnnnnnnnnnnnnnnnnnnnnnnnnnnnnnnnnnnnnnnnnnnnnnnnnnnnnnnnnnnnnnnnnnnnnnnnnnnnnnnnnnnnnnnnnnnnnnnnnnnnnnnnnnnnnnnnnnnnnnnnnnnnnnnnnnnnnnnnnnnnnnnnnnnnnnnnnnnnnnnnnnnnnnnnnnnnnnnnnnnnnnnnnnnnnnnnnnnnnnnnnnnnnnnnnnnnnnnnnnnnnnnnnnnnnnnnnnnnnnnnnnnnnnnnnnnnnnnnnnnnnnnnnnnnnnnnnnnnnnnnnnnnnnnnnnnnnnnnnnnnnnnnnnnnnnnnnnnnnnnnnnnnnnnnnnnnnnnnnnnnnnnnnnnnnnnnnnnnnnnnnnnnnnnnnnnnnnnnnnnnnnnnnnnnnnnnnnnnnnnnnnnnnnnnnnnnnnnnnnnnnnnnnnnnnnnnnnnnnnnnnnnnnnnnnnnnnnnnnnnnnnnnnnnnnnnnnnnnnnnnnnnnnnnnnnnnnnnnnnnnnnnnnnnnnnnnnnnnnnnnnnnnnnnnnnnnnnnnnnnnnnnnnnnnnnnnnnnnnnnnnnnnnnnnnnnnnnnnnnnnnnnnnnnnnnnnnnnnnnnnnnnnnnnnnnnnnnnnnnnnnnnnnnnnnnnnnnnnnnnnnnnnnnnnnnnnnnnnnnnnnnnnnnnnnnnnnnnnnnnnnnnnnnnnnnnnnnnnnnnnnnnnnnnnnnnnnnnnnnnnnnnnnnnnnnnnnnnnnnnnnnnnnnnnnnnnnnnnnnnnnnnnnnnnnnnnnnnnnnnnnnnnnnnnnnnnnnnnnnnnnnnnnnnnnnnnnnnnnnnnnnnnnnnnnnnnnnnnnnnnnnnnnnnnnnnnnnnnnnnnnnnnnnnnnnnnnnnnnnnnnnnnnnnnnnnnnnnnnnnnnnnnnnnnnnnnnnnnnnnnnnnnnnnnnnnnnnnnnnnnnnnnnnnnnnnnnnnnnnnnnnnnnnnnnnnnnnnnnnnnnnnnnnnnnnnnnnnnnnnnnnnnnnnnnnnnnnnnnnnnnnnnnnnnnnnnnnnnnnnnnnnnnnnnnnnnnnnnnnnnnnnnnnnnnnnnnnnnnnnnnnnnnnnnnnnnnnnnnnnnnnnnnnnnnnnnnnnnnnnnnnnnnnnnnnnnnnnnnnnnnnnnnnnnnnnnnnnnnnnnnnnnnnnnnnnnnnnnnnnnnnnnnnnnnnnnnnnnnnnnnnnnnnnnnnnnnnnnnnnnnnnnnnnnnnnnnnnnnnnnnnnnnnnnnnnnnnnnnnnnnnnnnnnnnnnnnnnnnnnnnnnnnnnnnnnnnnnnnnnnnnnnnnnnnnnnnnnnnnnnnnnnnnnnnnnnnnnnnnnnnnnnnnnnnnnnnnnnnnnnnnnnnnnnnnnnnnnnnnnnnnnnnnnnnnnnnnnnnnnnnnnnnnnnnnnnnnnnnnnnnnnnnnnnnnnnnnnnnnnnnnnnnnnnnnnnnnnnnnnnnnnnnnnnnnnnnnnnnnnnnnnnnnnnnnnnnnnnnnnnnnnnnnnnnnnnnnnnnnnnnnnnnnnnnnnnnnnnnnnnnnnnnnnnnnnnnnnnnnnnnnnnnnnnnnnnnnnnnnnnnnnnnnnnnnnnnnnnnnnnnnnnnnnnnnnnnnnnnnnnnnnnnnnnnnnnnnnnnnnnnnnnnnnnnnnnnnnnnnnnnnnnnnnnnnnnnnnnnnnnnnnnnnnnnnnnnnnnnnnnnnnnnnnnnnnnnnnnnnnnnnnnnnnnnnnnnnnnnnnnnnnnnnnnnnnnnnnnnnnnnnnnnnnnnnnnnnnnnnnnnnnnnnnnnnnnnnnnnnnnnnnnnnnnnnnnnnnnnnnnnnnnnnnnnnnnnnnnnnnnnnnnnnnnnnnnnnnnnnnnnnnnnnnnnnnnnnnnnnnnnnnnnnnnnnnnnnnnnnnnnnnnnnnnnnnnnnnnnnnnnnnnnnnnnnnnnnnnnnnnnnnnnnnnnnnnnnnnnnnnnnnnnnnnnnnnnnnnnnnnnnnnnnnnnnnnnnnnnnnnnnnnnnnnnnnnnnnnnnnnnnnnnnnnnnnnnnnnnnnnnnnnnnnnnnnnnnnnnnnnnnnnnnnnnnnnnnnnnnnnnnnnnnnnnnnnnnnnnnnnnnnnnnnnnnnnnnnnnnnnnnnnnnnnnnnnnnnnnnnnnnnnnnnnnnnnnnnnnnnnnnnnnnnnnnnnnnnnnnnnnnnnnnnnnnnnnnnnnnnnnnnnnnnnnnnnnnnnnnnnnnnnnnnnnnnnnnnnnnnnnnnnnnnnnnnnnnnnnnnnnnnnnnnnnnnnnnnnnnnnnnnnnnnnnnnnnnnnnnnnnnnnnnnnnnnnnnnnnnnnnnnnnnnnnnnnnnnnnnnnnnnnnnnnnnnnnnnnnnnnnnnnnnnnnnnnnnnnnnnnnnnnnnnnnnnnnnnnnnnnnnnnnnnnnnnnnnnnnnnnnnnnnnnnnnnnnnnnnnnnnnnnnnnnnnnnnnnnnnnnnnnnnnnnnnnnnnnnnnnnnnnnnnnnnnnnnnnnnnnnnnnnnnnnnnnnnnnnnnnnnnnnnnnnnnnnnnnnnnnnnnnnnnnnnnnnnnnnnnnnnnnnnnnnnnnnnnnnnnnnnnnnnnnnnnnnnnnnnnnnnnnnnnnnnnnnnnnnnnnnnnnnnnnnnnnnnnnnnnnnnnnnnnnnnnnnnnnnnnnnnnnnnnnnnnnnnnnnnnnnnnnnnnnnnnnnnnnnnnnnnnnnnnnnnnnnnnnnnnnnnnnnnnnnnnnnnnnnnnnnnnnnnnnnnnnnnnnnnnnnnnnnnnnnnnnnnnnnnnnnnnnnnnnnnnnnnnnnnnnnnnnnnnnnnnnnnnnnnnnnnnnnnnnnnnnnnnnnnnnnnnnnnnnnnnnnnnnnnnnnnnnnnnnnnnnnnnnnnnnnnnnnnnnnnnnnnnnnnnnnnnnnnnnnnnnnnnnnnnnnnnnnnnnnnnnnnnnnnnnnnnnnnnnnnnnnnnnnnnnnnnnnnnnnnnnnnnnnnnnnnnnnnnnnnnnnnnnnnnnnnnnnnnnnnnnnnnnnnnnnnnnnnnnnnnnnnnnnnnnnnnnnnnnnnnnnnnnnnnnnnnnnnnnnnnnnnnnnnnnnnnnnnnnnnnnnnnnnnnnnnnnnnnnnnnnnnnnnnnnnnnnnnnnnnnnnnnnnnnnnnnnnnnnnnnnnnnnnnnnnnnnnnnnnnnnnnnnnnnnnnnnnnnnnnnnnnnnnnnnnnnnnnnnnnnnnnnnnnnnnnnnnnnnnnnnnnnnnnnnnnnnnnnnnnnnnnnnnnnnnnnnnnnnnnnnnnnnnnnnnnnnnnnnnnnnnnnnnnnnnnnnnnnnnnnnnnnnnnnnnnnnnnnnnnnnnnnnnnnnnnnnnnnnnnnnnnnnnnnnnnnnnnnnnnnnnnnnnnnnnnnnnnnnnnnnnnnnnnnnnnnnnnnnnnnnnnnnnnnnnnnnnnnnnnnnnnnnnnnnnnnnnnnnnnnnnnnnnnnnnnnnnnnnnnnnnnnnnnnnnnnnnnnnnnnnnnnnnnnnnnnnnnnnnnnnnnnnnnnnnnnnnnnnnnnnnnnnnnnnnnnnnnnnnnnnnnnnnnnnnnnnnnnnnnnnnnnnnnnnnnnnnnnnnnnnnnnnnnnnnnnnnnnnnnnnnnnnnnnnnnnnnnnnnnnnnnnnnnnnnnnnnnnnnnnnnnnnnnnnnnnnnnnnnnnnnnnnnnnnnnnnnnnnnnnnnnnnnnnnnnnnnnnnnnnnnnnnnnnnnnnnnnnnnnnnnnnnnnnnnnnnnnnnnnnnnnnnnnnnnnnnnnnnnnnnnnnnnnnnnnnnnnnnnnnnnnnnnnnnnnnnnnnnnnnnnnnnnnnnnnnnnnnnnnnnnnnnnnnnnnnnnnnnnnnnnnnnnnnnnnnnnnnnnnnnnnnnnnnnnnnnnnnnnnnnnnnnnnnnnnnnnnnnnnnnnnnnnnnnnnnnnnnnnnnnnnnnnnnnnnnnnnnnnnnnnnnnnnnnnnnnnnnnnnnnnnnnnnnnnnnnnnnnnnnnnnnnnnnnnnnnnnnnnnnnnnnnnnnnnnnnnnnnnnnnnnnnnnnnnnnnnnnnnnnnnnnnnnnnnnnnnnnnnnnnnnnnnnnnnnnnnnnnnnnnnnnnnnnnnnnnnnnnnnnnnnnnnnnnnnnnnnnnnnnnnnnnnnnnnnnnnnnnnnnnnnnnnnnnnnnnnnnnnnnnnnnnnnnnnnnnnnnnnnnnnnnnnnnnnnnnnnnnnnnnnnnnnnnnnnnnnnnnnnnnnnnnnnnnnnnnnnnnnnnnnnnnnnnnnnnnnnnnnnnnnnnnnnnnnnnnnnnnnnnnnnnnnnnnnnnnnnnnnnnnnnnnnnnnnnnnnnnnnnnnnnnnnnnnnnnnnnnnnnnnnnnnnnnnnnnnnnnnnnnnnnnnnnnnnnnnnnnnnnnnnnnnnnnnnnnnnnnnnnnnnnnnnnnnnnnnnnnnnnnnnnnnnnnnnnnnnnnnnnnnnnnnnnnnnnnnnnnnnnnnnnnnnnnnnnnnnnnnnnnnnnnnnnnnnnnnnnnnnnnnnnnnnnnnnnnnnnnnnnnnnnnnnnnnnnnnnnnnnnnnnnnnnnnnnnnnnnnnnnnnnnnnnnnnnnnnnnnnnnnnnnnnnnnnnnnnnnnnnnnnnnnnnnnnnnnnnnnnnnnnnnnnnnnnnnnnnnnnnnnnnnnnnnnnnnnnnnnnnnnnnnnnnnnnnnnnnnnnnnnnnnnnnnnnnnnnnnnnnnnnnnnnnnnnnnnnnnnnnnnnnnnnnnnnnnnnnnnnnnnnnnnnnnnnnnnnnnnnnnnnnnnnnnnnnnnnnnnnnnnnnnnnnnnnnnnnnnnnnnnnnnnnnnnnnnnnnnnnnnnnnnnnnnnnnnnnnnnnnnnnnnnnnnnnnnnnnnnnnnnnnnnnnnnnnnnnnnnnnnnnnnnnnnnnnnnnnnnnnnnnnnnnnnnnnnnnnnnnnnnnnnnnnnnnnnnnnnnnnnnnnnnnnnnnnnnnnnnnnnnnnnnnnnnnnnnnnnnnnnnnnnnnnnnnnnnnnnnnnnnnnnnnnnnnnnnnnnnnnnnnnnnnnnnnnnnnnnnnnnnnnnnnnnnnnnnnnnnnnnnnnnnnnnnnnnnnnnnnnnnnnnnnnnnnnnnnnnnnnnnnnnnnnnnnnnnnnnnnnnnnnnnnnnnnnnnnnnnnnnnnnnnnnnnnnnnnnnnnnnnnnnnnnnnnnnnnnnnnnnnnnnnnnnnnnnnnnnnnnnnnnnnnnnnnnnnnnnnnnnnnnnnnnnnnnnnnnnnnnnnnnnnnnnnnnnnnnnnnnnnnnnnnnnnnnnnnnnnnnnnnnnnnnnnnnnnnnnnnnnnnnnnnnnnnnnnnnnnnnnnnnnnnnnnnnnnnnnnnnnnnnnnnnnnnnnnnnnnnnnnnnnnnnnnnnnnnnnnnnnnnnnnnnnnnnnnnnnnnnnnnnnnnnnnnnnnnnnnnnnnnnnnnnnnnnnnnnnnnnnnnnnnnnnnnnnnnnnnnnnnnnnnnnnnnnnnnnnnnnnnnnnnnnnnnnnnnnnnnnnnnnnnnnnnnnnnnnnnnnnnnnnnnnnnnnnnnnnnnnnnnnnnnnnnnnnnnnnnnnnnnnnnnnnnnnnnnnnnnnnnnnnnnnnnnnnnnnnnnnnnnnnnnnnnnnnnnnnnnnnnnnnnnnnnnnnnnnnnnnnnnnnnnnnnnnnnnnnnnnnnnnnnnnnnnnnnnnnnnnnnnnnnnnnnnnnnnnnnnnnnnnnnnnnnnnnnnnnnnnnnnnnnnnnnnnnnnnnnnnnnnnnnnnnnnnnnnnnnnnnnnnnnnnnnnnnnnnnnnnnnnnnnnnnnnnnnnnnnnnnnnnnnnnnnnnnnnnnnnnnnnnnnnnnnnnnnnnnnnnnnnnnnnnnnnnnnnnnnnnnnnnnnnnnnnnnnnnnnnnnnnnnnnnnnnnnnnnnnnnnnnnnnnnnnnnnnnnnnnnnnnnnnnnnnnnnnnnnnnnnnnnnnnnnnnnnnnnnnnnnnnnnnnnnnnnnnnnnnnnnnnnnnnnnnnnnnnnnnnnnnnnnnnnnnnnnnnnnnnnnnnnnnnnnnnnnnnnnnnnnnnnnnnnnnnnnnnnnnnnnnnnnnnnnnnnnnnnnnnnnnnnnnnnnnnnnnnnnnnnnnnnnnnnnnnnnnnnnnnnnnnnnnnnnnnnnnnnnnnnnnnnnnnnnnnnnnnnnnnnnnnnnnnnnnnnnnnnnnnnnnnnnnnnnnnnnnnnnnnnnnnnnnnnnnnnnnnnnnnnnnnnnnnnnnnnnnnnnnnnnnnnnnnnnnnnnnnnnnnnnnnnnnnnnnnnnnnnnnnnnnnnnnnnnnnnnnnnnnnnnnnnnnnnnnnnnnnnnnnnnnnnnnnnnnnnnnnnnnnnnnnnnnnnnnnnnnnnnnnnnnnnnnnnnnnnnnnnnnnnnnnnnnnnnnnnnnnnnnnnnnnnnnnnnnnnnnnnnnnnnnnnnnnnnnnnnnnnnnnnnnnnnnnnnnnnnnnnnnnnnnnnnnnnnnnnnnnnnnnnnnnnnnnnnnnnnnnnnnnnnnnnnnnnnnnnnnnnnnnnnnnnnnnnnnnnnnnnnnnnnnnnnnnnnnnnnnnnnnnnnnnnnnnnnnnnnnnnnnnnnnnnnnnnnnnnnnnnnnnnnnnnnnnnnnnnnnnnnnnnnnnnnnnnnnnnnnnnnnnnnnnnnnnnnnnnnnnnnnnnnnnnnnnnnnnnnnnnnnnnnnnnnnnnnnnnnnnnnnnnnnnnnnnnnnnnnnnnnnnnnnnnnnnnnnnnnnnnnnnnnnnnnnnnnnnnnnnnnnnnnnnnnnnnnnnnnnnnnnnnnnnnnnnnnnnnnnnnnnnnnnnnnnnnnnnnnnnnnnnnnnnnnnnnnnnnnnnnnnnnnnnnnnnnnnnnnnnnnnnnnnnnnnnnnnnnnnnnnnnnnnnnnnnnnnnnnnnnnnnnnnnnnnnnnnnnnnnnnnnnnnnnnnnnnnnnnnnnnnnnnnnnnnnnnnnnnnnnnnnnnnnnnnnnnnnnnnnnnnnnnnnnnnnnnnnnnnnnnnnnnnnnnnnnnnnnnnnnnnnnnnnnnnnnnnnnnnnnnnnnnnnnnnnnnnnnnnnnnnnnnnnnnnnnnnnnnnnnnnnnnnnnnnnnnnnnnnnnnnnnnnnnnnnnnnnnnnnnnnnnnnnnnnnnnnnnnnnnnnnnnnnnnnnnnnnnnnnnnnnnnnnnnnnnnnnnnnnnnnnnnnnnnnnnnnnnnnnnnnnnnnnnnnnnnnnnnnnnnnnnnnnnnnnnnnnnnnnnnnnnnnnnnnnnnnnnnnnnnnnnnnnnnnnnnnnnnnnnnnnnnnnnnnnnnnnnnnnnnnnnnnnnnnnnnnnnnnnnnnnnnnnnnnnnnnnnnnnnnnnnnnnnnnnnnnnnnnnnnnnnnnnnnnnnnnnnnnnnnnnnnnnnnnnnnnnnnnnnnnnnnnnnnnnnnnnnnnnnnnnnnnnnnnnnnnnnnnnnnnnnnnnnnnnnnnnnnnnnnnnnnnnnnnnnnnnnnnnnnnnnnnnnnnnnnnnnnnnnnnnnnnnnnnnnnnnnnnnnnnnnnnnnnnnnnnnnnnnnnnnnnnnnnnnnnnnnnnnnnnnnnnnnnnnnnnnnnnnnnnnnnnnnnnnnnnnnnnnnnnnnnnnnnnnnnnnnnnnnnnnnnnnnnnnnnnnnnnnnnnnnnnnnnnnnnnnnnnnnnnnnnnnnnnnnnnnnnnnnnnnnnnnnnnnnnnnnnnnnnnnnnnnnnnnnnnnnnnnnnnnnnnnnnnnnnnnnnnnnnnnnnnnnnnnnnnnnnnnnnnnnnnnnnnnnnnnnnnnnnnnnnnnnnnnnnnnnnnnnnnnnnnnnnnnnnnnnnnnnnnnnnnnnnnnnnnnnnnnnnnnnnnnnnnnnnnnnnnnnnnnnnnnnnnnnnnnnnnnnnnnnnnnnnnnnnnnnnnnnnnnnnnnnnnnnnnnnnnnnnnnnnnnnnnnnnnnnnnnnnnnnnnnnnnnnnnnnnnnnnnnnnnnnnnnnnnnnnnnnnnnnnnnnnnnnnnnnnnnnnnnnnnnnnnnnnnnnnnnnnnnnnnnnnnnnnnnnnnnnnnnnnnnnnnnnnnnnnnnnnnnnnnnnnnnnnnnnnnnnnnnnnnnnnnnnnnnnnnnnnnnnnnnnnnnnnnnnnnnnnnnnnnnnnnnnnnnnnnnnnnnnnnnnnnnnnnnnnnnnnnnnnnnnnnnnnnnnnnnnnnnnnnnnnnnnnnnnnnnnnnnnnnnnnnnnnnnnnnnnnnnnnnnnnnnnnnnnnnnnnnnnnnnnnnnnnnnnnnnnnnnnnnnnnnnnnnnnnnnnnnnnnnnnnnnnnnnnnnnnnnnnnnnnnnnnnnnnnnnnnnnnnnnnnnnnnnnnnnnnnnnnnnnnnnnnnnnnnnnnnnnnnnnnnnnnnnnnnnnnnnnnnnnnnnnnnnnnnnnnnnnnnnnnnnnnnnnnnnnnnnnnnnnnnnnnnnnnnnnnnnnnnnnnnnnnnnnnnnnnnnnnnnnnnnnnnnnnnnnnnnnnnnnnnnnnnnnnnnnnnnnnnnnnnnnnnnnnnnnnnnnnnnnnnnnnnnnnnnnnnnnnnnnnnnnnnnnnnnnnnnnnnnnnnnnnnnnnnnnnnnnnnnnnnnnnnnnnnnnnnnnnnnnnnnnnnnnnnnnnnnnnnnnnnnnnnnnnnnnnnnnnnnnnnnnnnnnnnnnnnnnnnnnnnnnnnnnnnnnnnnnnnnnnnnnnnnnnnnnnnnnnnnnnnnnnnnnnnnnnnnnnnnnnnnnnnnnnnnnnnnnnnnnnnnnnnnnnnnnnnnnnnnnnnnnnnnnnnnnnnnnnnnnnnnnnnnnnnnnnnnnnnnnnnnnnnnnnnnnnnnnnnnnnnnnnnnnnnnnnnnnnnnnnnnnnnnnnnnnnnnnnnnnnnnnnnnnnnnnnnnnnnnnnnnnnnnnnnnnnnnnnnnnnnnnnnnnnnnnnnnnnnnnnnnnnnnnnnnnnnnnnnnnnnnnnnnnnnnnnnnnnnnnnnnnnnnnnnnnnnnnnnnnnnnnnnnnnnnnnnnnnnnnnnnnnnnnnnnnnnnnnnnnnnnnnnnnnnnnnnnnnnnnnnnnnnnnnnnnnnnnnnnnnnnnnnnnnnnnnnnnnnnnnnnnnnnnnnnnnnnnnnnnnnnnnnnnnnnnnnnnnnnnnnnnnnnnnnnnnnnnnnnnnnnnnnnnnnnnnnnnnnnnnnnnnnnnnnnnnnnnnnnnnnnnnnnnnnnnnnnnnnnnnnnnnnnnnnnnnnnnnnnnnnnnnnnnnnnnnnnnnnnnnnnnnnnnnnnnnnnnnnnnnnnnnnnnnnnnnnnnnnnnnnnnnnnnnnnnnnnnnnnnnnnnnnnnnnnnnnnnnnnnnnnnnnnnnnnnnnnnnnnnnnnnnnnnnnnnnnnnnnnnnnnnnnnnnnnnnnnnnnnnnnnnnnnnnnnnnnnnnnnnnnnnnnnnnnnnnnnnnnnnnnnnnnnnnnnnnnnnnnnnnnnnnnnnnnnnnnnnnnnnnnnnnnnnnnnnnnnnnnnnnnnnnnnnnnnnnnnnnnnnnnnnnnnnnnnnnnnnnnnnnnnnnnnnnnnnnnnnnnnnnnnnnnnnnnnnnnnnnnnnnnnnnnnnnnnnnnnnnnnnnnnnnnnnnnnnnnnnnnnnnnnnnnnnnnnnnnnnnnnnnnnnnnnnnnnnnnnnnnnnnnnnnnnnnnnnnnnnnnnnnnnnnnnnnnnnnnnnnnnnnnnnnnnnnnnnnnnnnnnnnnnnnnnnnnnnnnnnnnnnnnnnnnnnnnnnnnnnnnnnnnnnnnnnnnnnnnnnnnnnnnnnnnnnnnnnnnnnnnnnnnnnnnnnnnnnnnnnnnnnnnnnnnnnnnnnnnnnnnnnnnnnnnnnnnnnnnnnnnnnnnnnnnnnnnnnnnnnnnnnnnnnnnnnnnnnnnnnnnnnnnnnnnnnnnnnnnnnnnnnnnnnnnnnnnnnnnnnnnnnnnnnnnnnnnnnnnnnnnnnnnnnnnnnnnnnnnnnnnnnnnnnnnnnnnnnnnnnnnnnnnnnnnnnnnnnnnnnnnnnnnnnnnnnnnnnnnnnnnnnnnnnnnnnnnnnnnnnnnnnnnnnnnnnnnnnnnnnnnnnnnnnnnnnnnnnnnnnnnnnnnnnnnnnnnnnnnnnnnnnnnnnnnnnnnnnnnnnnnnnnnnnnnnnnnnnnnnnnnnnnnnnnnnnnnnnnnnnnnnnnnnnnnnnnnnnnnnnnnnnnnnnnnnnnnnnnnnnnnnnnnnnnnnnnnnnnnnnnnnnnnnnnnnnnnnnnnnnnnnnnnnnnnnnnnnnnnnnnnnnnnnnnnnnnnnnnnnnnnnnnnnnnnnnnnnnnnnnnnnnnnnnnnnnnnnnnnnnnnnnnnnnnnnnnnnnnnnnnnnnnnnnnnnnnnnnnnnnnnnnnnnnnnnnnnnnnnnnnnnnnnnnnnnnnnnnnnnnnnnnnnnnnnnnnnnnnnnnnnnnnnnnnnnnnnnnnnnnnnnnnnnnnnnnnnnnnnnnnnnnnnnnnnnnnnnnnnnnnnnnnnnnnnnnnnnnnnnnnnnnnnnnnnnnnnnnnnnnnnnnnnnnnnnnnnnnnnnnnnnnnnnnnnnnnnnnnnnnnnnnnnnnnnnnnnnnnnnnnnnnnnnnnnnnnnnnnnnnnnnnnnnnnnnnnnnnnnnnnnnnnnnnnnnnnnnnnnnnnnnnnnnnnnnnnnnnnnnnnnnnnnnnnnnnnnnnnnnnnnnnnnnnnnnnnnnnnnnnnnnnnnnnnnnnnnnnnnnnnnnnnnnnnnnnnnnnnnnnnnnnnnnnnnnnnnnnnnnnnnnnnnnnnnnnnnnnnnnnnnnnnnnnnnnnnnnnnnnnnnnnnnnnnnnnnnnnnnnnnnnnnnnnnnnnnnnnnnnnnnnnnnnnnnnnnnnnnnnnnnnnnnnnnnnnnnnnnnnnnnnnnnnnnnnnnnnnnnnnnnnnnnnnnnnnnnnnnnnnnnnnnnnnnnnnnnnnnnnnnnnnnnnnnnnnnnnnnnnnnnnnnnnnnnnnnnnnnnnnnnnnnnnnnnnnnnnnnnnnnnnnnnnnnnnnnnnnnnnnnnnnnnnnnnnnnnnnnnnnnnnnnnnnnnnnnnnnnnnnnnnnnnnnnnnnnnnnnnnnnnnnnnnnnnnnnnnnnnnnnnnnnnnnnnnnnnnnnnnnnnnnnnnnnnnnnnnnnnnnnnnnnnnnnnnnnnnnnnnnnnnnnnnnnnnnnnnnnnnnnnnnnnnnnnnnnnnnnnnnnnnnnnnnnnnnnnnnnnnnnnnnnnnnnnnnnnnnnnnnnnnnnnnnnnnnnnnnnnnnnnnnnnnnnnnnnnnnnnnnnnnnnnnnnnnnnnnnnnnnnnnnnnnnnnnnnnnnnnnnnnnnnnnnnnnnnnnnnnnnnnnnnnnnnnnnnnnnnnnnnnnnnnnnnnnnnnnnnnnnnnnnnnnnnnnnnnnnnnnnnnnnnnnnnnnnnnnnnnnnnnnnnnnnnnnnnnnnnnnnnnnnnnnnnnnnnnnnnnnnnnnnnnnnnnnnnnnnnnnnnnnnnnnnnnnnnnnnnnnnnnnnnnnnnnnnnnnnnnnnnnnnnnnnnnnnnnnnnnnnnnnnnnnnnnnnnnnnnnnnnnnnnnnnnnnnnnnnnnnnnnnnnnnnnnnnnnnnnnnnnnnnnnnnnnnnnnnnnnnnnnnnnnnnnnnnnnnnnnnnnnnnnnnnnnnnnnnnnnnnnnnnnnnnnnnnnnnnnnnnnnnnnnnnnnnnnnnnnnnnnnnnnnnnnnnnnnnnnnnnnnnnnnnnnnnnnnnnnnnnnnnnnnnnnnnnnnnnnnnnnnnnnnnnnnnnnnnnnnnnnnnnnnnnnnnnnnnnnnnnnnnnnnnnnnnnnnnnnnnnnnnnnnnnnnnnnnnnnnnnnnnnnnnnnnnnnnnnnnnnnnnnnnnnnnnnnnnnnnnnnnnnnnnnnnnnnnnnnnnnnnnnnnnnnnnnnnnnnnnnnnnnnnnnnnnnnnnnnnnnnnnnnnnnnnnnnnnnnnnnnnnnnnnnnnnnnnnnnnnnnnnnnnnnnnnnnnnnnnnnnnnnnnnnnnnnnnnnnnnnnnnnnnnnnnnnnnnnnnnnnnnnnnnnnnnnnnnnnnnnnnnnnnnnnnnnnnnnnnnnnnnnnnnnnnnnnnnnnnnnnnnnnnnnnnnnnnnnnnnnnnnnnnnnnnnnnnnnnnnnnnnnnnnnnnnnnnnnnnnnnnnnnnnnnnnnnnnnnnnnnnnnnnnnnnnnnnnnnnnnnnnnnnnnnnnnnnnnnnnnnnnnnnnnnnnnnnnnnnnnnnnnnnnnnnnnnnnnnnnnnnnnnnnnnnnnnnnnnnnnnnnnnnnnnnnnnnnnnnnnnnnnnnnnnnnnnnnnnnnnnnnnnnnnnnnnnnnnnnnnnnnnnnnnnnnnnnnnnnnnnnnnnnnnnnnnnnnnnnnnnnnnnnnnnnnnnnnnnnnnnnnnnnnnnnnnnnnnnnnnnnnnnnnnnnnnnnnnnnnnnnnnnnnnnnnnnnnnnnnnnnnnnnnnnnnnnnnnnnnnnnnnnnnnnnnnnnnnnnnnnnnnnnnnnnnnnnnnnnnnnnnnnnnnnnnnnnnnnnnnnnnnnnnnnnnnnnnnnnnnnnnnnnnnnnnnnnnnnnnnnnnnnnnnnnnnnnnnnnnnnnnnnnnnnnnnnnnnnnnnnnnnnnnnnnnnnnnnnnnnnnnnnnnnnnnnnnnnnnnnnnnnnnnnnnnnnnnnnnnnnnnnnnnnnnnnnnnnnnnnnnnnnnnnnnnnnnnnnnnnnnnnnnnnnnnnnnnnnnnnnnnnnnnnnnnnnnnnnnnnnnnnnnnnnnnnnnnnnnnnnnnnnnnnnnnnnnnnnnnnnnnnnnnnnnnnnnnnnnnnnnnnnnnnnnnnnnnnnnnnnnnnnnnnnnnnnnnnnnnnnnnnnnnnnnnnnnnnnnnnnnnnnnnnnnnnnnnnnnnnnnnnnnnnnnnnnnnnnnnnnnnnnnnnnnnnnnnnnnnnnnnnnnnnnnnnnnnnnnnnnnnnnnnnnnnnnnnnnnnnnnnnnnnnnnnnnnnnnnnnnnnnnnnnnnnnnnnnnnnnnnnnnnnnnnnnnnnnnnnnnnnnnnnnnnnnnnnnnnnnnnnnnnnnnnnnnnnnnnnnnnnnnnnnnnnnnnnnnnnnnnnnnnnnnnnnnnnnnnnnnnnnnnnnnnnnnnnnnnnnnnnnnnnnnnnnnnnnnnnnnnnnnnnnnnnnnnnnnnnnnnnnnnnnnnnnnnnnnnnnnnnnnnnnnnnnnnnnnnnnnnnnnnnnnnnnnnnnnnnnnnnnnnnnnnnnnnnnnnnnnnnnnnnnnnnnnnnnnnnnnnnnnnnnnnnnnnnnnnnnnnnnnnnnnnnnnnnnnnnnnnnnnnnnnnnnnnnnnnnnnnnnnnnnnnnnnnnnnnnnnnnnnnnnnnnnnnnnnnnnnnnnnnnnnnnnnnnnnnnnnnnnnnnnnnnnnnnnnnnnnnnnnnnnnnnnnnnnnnnnnnnnnnnnnnnnnnnnnnnnnnnnnnnnnnnnnnnnnnnnnnnnnnnnnnnnnnnnnnnnnnnnnnnnnnnnnnnnnnnnnnnnnnnnnnnnnnnnnnnnnnnnnnnnnnnnnnnnnnnnnnnnnnnnnnnnnnnnnnnnnnnnnnnnnnnnnnnnnnnnnnnnnnnnnnnnnnnnnnnnnnnnnnnnnnnnnnnnnnnnnnnnnnnnnnnnnnnnnnnnnnnnnnnnnnnnnnnnnnnnnnnnnnnnnnnnnnnnnnnnnnnnnnnnnnnnnnnnnnnnnnnnnnnnnnnnnnnnnnnnnnnnnnnnnnnnnnnnnnnnnnnnnnnnnnnnnnnnnnnnnnnnnnnnnnnnnnnnnnnnnnnnnnnnnnnnnnnnnnnnnnnnnnnnnnnnnnnnnnnnnnnnnnnnnnnnnnnnnnnnnnnnnnnnnnnnnnnnnnnnnnnnnnnnnnnnnnnnnnnnnnnnnnnnnnnnnnnnnnnnnnnnnnnnnnnnnnnnnnnnnnnnnnnnnnnnnnnnnnnnnnnnnnnnnnnnnnnnnnnnnnnnnnnnnnnnnnnnnnnnnnnnnnnnnnnnnnnnnnnnnnnnnnnnnnnnnnnnnnnnnnnnnnnnnnnnnnnnnnnnnnnnnnnnnnnnnnnnnnnnnnnnnnnnnnnnnnnnnnnnnnnnnnnnnnnnnnnnnnnnnnnnnnnnnnnnnnnnnnnnnnnnnnnnnnnnnnnnnnnnnnnnnnnnnnnnnnnnnnnnnnnnnnnnnnnnnnnnnnnnnnnnnnnnnnnnnnnnnnnnnnnnnnnnnnnnnnnnnnnnnnnnnnnnnnnnnnnnnnnnnnnnnnnnnnnnnnnnnnnnnnnnnnnnnnnnnnnnnnnnnnnnnnnnnnnnnnnnnnnnnnnnnnnnnnnnnnnnnnnnnnnnnnnnnnnnnnnnnnnnnnnnnnnnnnnnnnnnnnnnnnnnnnnnnnnnnnnnnnnnnnnnnnnnnnnnnnnnnnnnnnnnnnnnnnnnnnnnnnnnnnnnnnnnnnnnnnnnnnnnnnnnnnnnnnnnnnnnnnnnnnnnnnnnnnnnnnnnnnnnnnnnnnnnnnnnnnnnnnnnnnnnnnnnnnnnnnnnnnnnnnnnnnnnnnnnnnnnnnnnnnnnnnnnnnnnnnnnnnnnnnnnnnnnnnnnnnnnnnnnnnnnnnnnnnnnnnnnnnnnnnnnnnnnnnnnnnnnnnnnnnnnnnnnnnnnnnnnnnnnnnnnnnnnnnnnnnnnnnnnnnnnnnnnnnnnnnnnnnnnnnnnnnnnnnnnnnnnnnnnnnnnnnnnnnnnnnnnnnnnnnnnnnnnnnnnnnnnnnnnnnnnnnnnnnnnnnnnnnnnnnnnnnnnnnnnnnnnnnnnnnnnnnnnnnnnnnnnnnnnnnnnnnnnnnnnnnnnnnnnnnnnnnnnnnnnnnnnnnnnnnnnnnnnnnnnnnnnnnnnnnnnnnnnnnnnnnnnnnnnnnnnnnnnnnnnnnnnnnnnnnnnnnnnnnnnnnnnnnnnnnnnnnnnnnnnnnnnnnnnnnnnnnnnnnnnnnnnnnnnnnnnnnnnnnnnnnnnnnnnnnnnnnnnnnnnnnnnnnnnnnnnnnnnnnnnnnnnnnnnnnnnnnnnnnnnnnnnnnnnnnnnnnnnnnnnnnnnnnnnnnnnnnnnnnnnnnnnnnnnnnnnnnnnnnnnnnnnnnnnnnnnnnnnnnnnnnnnnnnnnnnnnnnnnnnnnnnnnnnnnnnnnnnnnnnnnnnnnnnnnnnnnnnnnnnnnnnnnnnnnnnnnnnnnnnnnnnnnnnnnnnnnnnnnnnnnnnnnnnnnnnnnnnnnnnnnnnnnnnnnnnnnnnnnnnnnnnnnnnnnnnnnnnnnnnnnnnnnnnnnnnnnnnnnnnnnnnnnnnnnnnnnnnnnnnnnnnnnnnnnnnnnnnnnnnnnnnnnnnnnnnnnnnnnnnnnnnnnnnnnnnnnnnnnnnnnnnnnnnnnnnnnnnnnnnnnnnnnnnnnnnnnnnnnnnnnnnnnnnnnnnnnnnnnnnnnnnnnnnnnnnnnnnnnnnnnnnnnnnnnnnnnnnnnnnnnnnnnnnnnnnnnnnnnnnnnnnnnnnnnnnnnnnnnnnnnnnnnnnnnnnnnnnnnnnnnnnnnnnnnnnnnnnnnnnnnnnnnnnnnnnnnnnnnnnnnnnnnnnnnnnnnnnnnnnnnnnnnnnnnnnnnnnnnnnnnnnnnnnnnnnnnnnnnnnnnnnnnnnnnnnnnnnnnnnnnnnnnnnnnnnnnnnnnnnnnnnnnnnnnnnnnnnnnnnnnnnnnnnnnnnnnnnnnnnnnnnnnnnnnnnnnnnnnnnnnnnnnnnnnnnnnnnnnnnnnnnnnnnnnnnnnnnnnnnnnnnnnnnnnnnnnnnnnnnnnnnnnnnnnnnnnnnnnnnnnnnnnnnnnnnnnnnnnnnnnnnnnnnnnnnnnnnnnnnnnnnnnnnnnnnnnnnnnnnnnnnnnnnnnnnnnnnnnnnnnnnnnnnnnnnnnnnnnnnnnnnnnnnnnnnnnnnnnnnnnnnnnnnnnnnnnnnnnnnnnnnnnnnnnnnnnnnnnnnnnnnnnnnnnnnnnnnnnnnnnnnnnnnnnnnnnnnnnnnnnnnnnnnnnnnnnnnnnnnnnnnnnnnnnnnnnnnnnnnnnnnnnnnnnnnnnnnnnnnnnnnnnnnnnnnnnnnnnnnnnnnnnnnnnnnnnnnnnnnnnnnnnnnnnnnnnnnnnnnnnnnnnnnnnnnnnnnnnnnnnnnnnnnnnnnnnnnnnnnnnnnnnnnnnnnnnnnnnnnnnnnnnnnnnnnnnnnnnnnnnnnnnnnnnnnnnnnnnnnnnnnnnnnnnnnnnnnnnnnnnnnnnnnnnnnnnnnnnnnnnnnnnnnnnnnnnnnnnnnnnnnnnnnnnnnnnnnnnnnnnnnnnnnnnnnnnnnnnnnnnnnnnnnnnnnnnnnnnnnnnnnnnnnnnnnnnnnnnnnnnnnnnnnnnnnnnnnnnnnnnnnnnnnnnnnnnnnnnnnnnnnnnnnnnnnnnnnnnnnnnnnnnnnnnnnnnnnnnnnnnnnnnnnnnnnnnnnnnnnnnnnnnnnnnnnnnnnnnnnnnnnnnnnnnnnnnnnnnnnnnnnnnnnnnnnnnnnnnnnnnnnnnnnnnnnnnnnnnnnnnnnnnnnnnnnnnnnnnnnnnnnnnnnnnnnnnnnnnnnnnnnnnnnnnnnnnnnnnnnnnnnnnnnnnnnnnnnnnnnnnnnnnnnnnnnnnnnnnnnnnnnnnnnnnnnnnnnnnnnnnnnnnnnnnnnnnnnnnnnnnnnnnnnnnnnnnnnnnnnnnnnnnnnnnnnnnnnnnnnnnnnnnnnnnnnnnnnnnnnnnnnnnnnnnnnnnnnnnnnnnnnnnnnnnnnnnnnnnnnnnnnnnnnnnnnnnnnnnnnnnnnnnnnnnnnnnnnnnnnnnnnnnnnnnnnnnnnnnnnnnnnnnnnnnnnnnnnnnnnnnnnnnnnnnnnnnnnnnnnnnnnnnnnnnnnnnnnnnnnnnnnnnnnnnnnnnnnnnnnnnnnnnnnnnnnnnnnnnnnnnnnnnnnnnnnnnnnnnnnnnnnnnnnnnnnnnnnnnnnnnnnnnnnnnnnnnnnnnnnnnnnnnnnnnnnnnnnnnnnnnnnnnnnnnnnnnnnnnnnnnnnnnnnnnnnnnnnnnnnnnnnnnnnnnnnnnnnnnnnnnnnnnnnnnnnnnnnnnnnnnnnnnnnnnnnnnnnnnnnnnnnnnnnnnnnnnnnnnnnnnnnnnnnnnnnnnnnnnnnnnnnnnnnnnnnnnnnnnnnnnnnnnnnnnnnnnnnnnnnnnnnnnnnnnnnnnnnnnnnnnnnnnnnnnnnnnnnnnnnnnnnnnnnnnnnnnnnnnnnnnnnnnnnnnnnnnnnnnnnnnnnnnnnnnnnnnnnnnnnnnnnnnnnnnnnnnnnnnnnnnnnnnnnnnnnnnnnnnnnnnnnnnnnnnnnnnnnnnnnnnnnnnnnnnnnnnnnnnnnnnnnnnnnnnnnnnnnnnnnnnnnnnnnnnnnnnnnnnnnnnnnnnnnnnnnnnnnnnnnnnnnnnnnnnnnnnnnnnnnnnnnnnnnnnnnnnnnnnnnnnnnnnnnnnnnnnnnnnnnnnnnnnnnnnnnnnnnnnnnnnnnnnnnnnnnnnnnnnnnnnnnnnnnnnnnnnnnnnnnnnnnnnnnnnnnnnnnnnnnnnnnnnnnnnnnnnnnnnnnnnnnnnnnnnnnnnnnnnnnnnnnnnnnnnnnnnnnnnnnnnnnnnnnnnnnnnnnnnnnnnnnnnnnnnnnnnnnnnnnnnnnnnnnnnnnnnnnnnnnnnnnnnnnnnnnnnnnnnnnnnnnnnnnnnnnnnnnnnnnnnnnnnnnnnnnnnnnnnnnnnnnnnnnnnnnnnnnnnnnnnnnnnnnnnnnnnnnnnnnnnnnnnnnnnnnnnnnnnnnnnnnnnnnnnnnnnnnnnnnnnnnnnnnnnnnnnnnnnnnnnnnnnnnnnnnnnnnnnnnnnnnnnnnnnnnnnnnnnnnnnnnnnnnnnnnnnnnnnnnnnnnnnnnnnnnnnnnnnnnnnnnnnnnnnnnnnnnnnnnnnnnnnnnnnnnnnnnnnnnnnnnnnnnnnnnnnnnnnnnnnnnnnnnnnnnnnnnnnnnnnnnnnnnnnnnnnnnnnnnnnnnnnnnnnnnnnnnnnnnnnnnnnnnnnnnnnnnnnnnnnnnnnnnnnnnnnnnnnnnnnnnnnnnnnnnnnnnnnnnnnnnnnnnnnnnnnnnnnnnnnnnnnnnnnnnnnnnnnnnnnnnnnnnnnnnnnnnnnnnnnnnnnnnnnnnnnnnnnnnnnnnnnnnnnnnnnnnnnnnnnnnnnnnnnnnnnnnnnnnnnnnnnnnnnnnnnnnnnnnnnnnnnnnnnnnnnnnnnnnnnnnnnnnnnnnnnnnnnnnnnnnnnnnnnnnnnnnnnnnnnnnnnnnnnnnnnnnnnnnnnnnnnnnnnnnnnnnnnnnnnnnnnnnnnnnnnnnnnnnnnnnnnnnnnnnnnnnnnnnnnnnnnnnnnnnnnnnnnnnnnnnnnnnnnnnnnnnnnnnnnnnnnnnnnnnnnnnnnnnnnnnnnnnnnnnnnnnnnnnnnnnnnnnnnnnnnnnnnnnnnnnnnnnnnnnnnnnnnnnnnnnnnnnnnnnnnnnnnnnnnnnnnnnnnnnnnnnnnnnnnnnnnnnnnnnnnnnnnnnnnnnnnnnnnnnnnnnnnnnnnnnnnnnnnnnnnnnnnnnnnnnnnnnnnnnnnnnnnnnnnnnnnnnnnnnnnnnnnnnnnnnnnnnnnnnnnnnnnnnnnnnnnnnnnnnnnnnnnnnnnnnnnnnnnnnnnnnnnnnnnnnnnnnnnnnnnnnnnnnnnnnnnnnnnnnnnnnnnnnnnnnnnnnnnnnnnnnnnnnnnnnnnnnnnnnnnnnnnnnnnnnnnnnnnnnnnnnnnnnnnnnnnnnnnnnnnnnnnnnnnnnnnnnnnnnnnnnnnnnnnnnnnnnnnnnnnnnnnnnnnnnnnnnnnnnnnnnnnnnnnnnnnnnnnnnnnnnnnnnnnnnnnnnnnnnnnnnnnnnnnnnnnnnnnnnnnnnnnnnnnnnnnnnnnnnnnnnnnnnnnnnnnnnnnnnnnnnnnnnnnnnnnnnnnnnnnnnnnnnnnnnnnnnnnnnnnnnnnnnnnnnnnnnnnnnnnnnnnnnnnnnnnnnnnnnnnnnnnnnnnnnnnnnnnnnnnnnnnnnnnnnnnnnnnnnnnnnnnnnnnnnnnnnnnnnnnnnnnnnnnnnnnnnnnnnnnnnnnnnnnnnnnnnnnnnnnnnnnnnnnnnnnnnnnnnnnnnnnnnnnnnnnnnnnnnnnnnnnnnnnnnnnnnnnnnnnnnnnnnnnnnnnnnnnnnnnnnnnnnnnnnnnnnnnnnnnnnnnnnnnnnnnnnnnnnnnnnnnnnnnnnnnnnnnnnnnnnnnnnnnnnnnnnnnnnnnnnnnnnnnnnnnnnnnnnnnnnnnnnnnnnnnnnnnnnnnnnnnnnnnnnnnnnnnnnnnnnnnnnnnnnnnnnnnnnnnnnnnnnnnnnnnnnnnnnnnnnnnnnnnnnnnnnnnnnnnnnnnnnnnnnnnnnnnnnnnnnnnnnnnnnnnnnnnnnnnnnnnnnnnnnnnnnnnnnnnnnnnnnnnnnnnnnnnnnnnnnnnnnnnnnnnnnnnnnnnnnnnnnnnnnnnnnnnnnnnnnnnnnnnnnnnnnnnnnnnnnnnnnnnnnnnnnnnnnnnnnnnnnnnnnnnnnnnnnnnnnnnnnnnnnnnnnnnnnnnnnnnnnnnnnnnnnnnnnnnnnnnnnnnnnnnnnnnnnnnnnnnnnnnnnnnnnnnnnnnnnnnnnnnnnnnnnnnnnnnnnnnnnnnnnnnnnnnnnnnnnnnnnnnnnnnnnnnnnnnnnnnnnnnnnnnnnnnnnnnnnnnnnnnnnnnnnnnnnnnnnnnnnnnnnnnnnnnnnnnnnnnnnnnnnnnnnnnnnnnnnnnnnnnnnnnnnnnnnnnnnnnnnnnnnnnnnnnnnnnnnnnnnnnnnnnnnnnnnnnnnnnnnnnnnnnnnnnnnnnnnnnnnnnnnnnnnnnnnnnnnnnnnnnnnnnnnnnnnnnnnnnnnnnnnnnnnnnnnnnnnnnnnnnnnnnnnnnnnnnnnnnnnnnnnnnnnnnnnnnnnnnnnnnnnnnnnnnnnnnnnnnnnnnnnnnnnnnnnnnnnnnnnnnnnnnnnnnnnnnnnnnnnnnnnnnnnnnnnnnnnnnnnnnnnnnnnnnnnnnnnnnnnnnnnnnnnnnnnnnnnnnnnnnnnnnnnnnnnnnnnnnnnnnnnnnnnnnnnnnnnnnnnnnnnnnnnnnnnnnnnnnnnnnnnnnnnnnnnnnnnnnnnnnnnnnnnnnnnnnnnnnnnnnnnnnnnnnnnnnnnnnnnnnnnnnnnnnnnnnnnnnnnnnnnnnnnnnnnnnnnnnnnnnnnnnnnnnnnnnnnnnnnnnnnnnnnnnnnnnnnnnnnnnnnnnnnnnnnnnnnnnnnnnnnnnnnnnnnnnnnnnnnnnnnnnnnnnnnnnnnnnnnnnnnnnnnnnnnnnnnnnnnnnnnnnnnnnnnnnnnnnnnnnnnnnnnnnnnnnnnnnnnnnnnnnnnnnnnnnnnnnnnnnnnnnnnnnnnnnnnnnnnnnnnnnnnnnnnnnnnnnnnnnnnnnnnnnnnnnnnnnnnnnnnnnnnnnnnnnnnnnnnnnnnnnnnnnnnnnnnnnnnnnnnnnnnnnnnnnnnnnnnnnnnnnnnnnnnnnnnnnnnnnnnnnnnnnnnnnnnnnnnnnnnnnnnnnnnnnnnnnnnnnnnnnnnnnnnnnnnnnnnnnnnnnnnnnnnnnnnnnnnnnnnnnnnnnnnnnnnnnnnnnnnnnnnnnnnnnnnnnnnnnnnnnnnnnnnnnnnnnnnnnnnnnnnnnnnnnnnnnnnnnnnnnnnnnnnnnnnnnnnnnnnnnnnnnnnnnnnnnnnnnnnnnnnnnnnnnnnnnnnnnnnnnnnnnnnnnnnnnnnnnnnnnnnnnnnnnnnnnnnnnnnnnnnnnnnnnnnnnnnnnnnnnnnnnnnnnnnnnnnnnnnnnnnnnnnnnnnnnnnnnnnnnnnnnnnnnnnnnnnnnnnnnnnnnnnnnnnnnnnnnnnnnnnnnnnnnnnnnnnnnnnnnnnnnnnnnnnnnnnnnnnnnnnnnnnnnnnnnnnnnnnnnnnnnnnnnnnnnnnnnnnnnnnnnnnnnnnnnnnnnnnnnnnnnnnnnnnnnnnnnnnnnnnnnnnnnnnnnnnnnnnnnnnnnnnnnnnnnnnnnnnnnnnnnnnnnnnnnnnnnnnnnnnnnnnnnnnnnnnnnnnnnnnnnnnnnnnnnnnnnnnnnnnnnnnnnnnnnnnnnnnnnnnnnnnnnnnnnnnnnnnnnnnnnnnnnnnnnnnnnnnnnnnnnnnnnnnnnnnnnnnnnnnnnnnnnnnnnnnnnnnnnnnnnnnnnnnnnnnnnnnnnnnnnnnnnnnnnnnnnnnnnnnnnnnnnnnnnnnnnnnnnnnnnnnnnnnnnnnnnnnnnnnnnnnnnnnnnnnnnnnnnnnnnnnnnnnnnnnnnnnnnnnnnnnnnnnnnnnnnnnnnnnnnnnnnnnnnnnnnnnnnnnnnnnnnnnnnnnnnnnnnnnnnnnnnnnnnnnnnnnnnnnnnnnnnnnnnnnnnnnnnnnnnnnnnnnnnnnnnnnnnnnnnnnnnnnnnnnnnnnnnnnnnnnnnnnnnnnnnnnnnnnnnnnnnnnnnnnnnnnnnnnnnnnnnnnnnnnnnnnnnnnnnnnnnnnnnnnnnnnnnnnnnnnnnnnnnnnnnnnnnnnnnnnnnnnnnnnnnnnnnnnnnnnnnnnnnnnnnnnnnnnnnnnnnnnnnnnnnnnnnnnnnnnnnnnnnnnnnnnnnnnnnnnnnnnnnnnnnnnnnnnnnnnnnnnnnnnnnnnnnnnnnnnnnnnnnnnnnnnnnnnnnnnnnnnnnnnnnnnnnnnnnnnnnnnnnnnnnnnnnnnnnnnnnnnnnnnnnnnnnnnnnnnnnnnnnnnnnnnnnnnnnnnnnnnnnnnnnnnnnnnnnnnnnnnnnnnnnnnnnnnnnnnnnnnnnnnnnnnnnnnnnnnnnnnnnnnnnnnnnnnnnnnnnnnnnnnnnnnnnnnnnnnnnnnnnnnnnnnnnnnnnnnnnnnnnnnnnnnnnnnnnnnnnnnnnnnnnnnnnnnnnnnnnnnnnnnnnnnnnnnnnnnnnnnnnnnnnnnnnnnnnnnnnnnnnnnnnnnnnnnnnnnnnnnnnnnnnnnnnnnnnnnnnnnnnnnnnnnnnnnnnnnnnnnnnnnnnnnnnnnnnnnnnnnnnnnnnnnnnnnnnnnnnnnnnnnnnnnnnnnnnnnnnnnnnnnnnnnnnnnnnnnnnnnnnnnnnnnnnnnnnnnnnnnnnnnnnnnnnnnnnnnnnnnnnnnnnnnnnnnnnnnnnnnnnnnnnnnnnnnnnnnnnnnnnnnnnnnnnnnnnnnnnnnnnnnnnnnnnnnnnnnnnnnnnnnnnnnnnnnnnnnnnnnnnnnnnnnnnnnnnnnnnnnnnnnnnnnnnnnnnnnnnnnnnnnnnnnnnnnnnnnnnnnnnnnnnnnnnnnnnnnnnnnnnnnnnnnnnnnnnnnnnnnnnnnnnnnnnnnnnnnnnnnnnnnnnnnnnnnnnnnnnnnnnnnnnnnnnnnnnnnnnnnnnnnnnnnnnnnnnnnnnnnnnnnnnnnnnnnnnnnnnnnnnnnnnnnnnnnnnnnnnnnnnnnnnnnnnnnnnnnnnnnnnnnnnnnnnnnnnnnnnnnnnnnnnnnnnnnnnnnnnnnnnnnnnnnnnnnnnnnnnnnnnnnnnnnnnnnnnnnnnnnnnnnnnnnnnnnnnnnnnnnnnnnnnnnnnnnnnnnnnnnnnnnnnnnnnnnnnnnnnnnnnnnnnnnnnnnnnnnnnnnnnnnnnnnnnnnnnnnnnnnnnnnnnnnnnnnnnnnnnnnnnnnnnnnnnnnnnnnnnnnnnnnnnnnnnnnnnnnnnnnnnnnnnnnnnnnnnnnnnnnnnnnnnnnnnnnnnnnnnnnnnnnnnnnnnnnnnnnnnnnnnnnnnnnnnnnnnnnnnnnnnnnnnnnnnnnnnnnnnnnnnnnnnnnnnnnnnnnnnnnnnnnnnnnnnnnnnnnnnnnnnnnnnnnnnnnnnnnnnnnnnnnnnnnnnnnnnnnnnnnnnnnnnnnnnnnnnnnnnnnnnnnnnnnnnnnnnnnnnnnnnnnnnnnnnnnnnnnnnnnnnnnnnnnnnnnnnnnnnnnnnnnnnnnnnnnnnnnnnnnnnnnnnnnnnnnnnnnnnnnnnnnnnnnnnnnnnnnnnnnnnnnnnnnnnnnnnnnnnnnnnnnnnnnnnnnnnnnnnnnnnnnnnnnnnnnnnnnnnnnnnnnnnnnnnnnnnnnnnnnnnnnnnnnnnnnnnnnnnnnnnnnnnnnnnnnnnnnnnnnnnnnnnnnnnnnnnnnnnnnnnnnnnnnnnnnnnnnnnnnnnnnnnnnnnnnnnnnnnnnnnnnnnnnnnnnnnnnnnnnnnnnnnnnnnnnnnnnnnnnnnnnnnnnnnnnnnnnnnnnnnnnnnnnnnnnnnnnnnnnnnnnnnnnnnnnnnnnnnnnnnnnnnnnnnnnnnnnnnnnnnnnnnnnnnnnnnnnnnnnnnnnnnnnnnnnnnnnnnnnnnnnnnnnnnnnnnnnnnnnnnnnnnnnnnnnnnnnnnnnnnnnnnnnnnnnnnnnnnnnnnnnnnnnnnnnnnnnnnnnnnnnnnnnnnnnnnnnnnnnnnnnnnnnnnnnnnnnnnnnnnnnnnnnnnnnnnnnnnnnnnnnnnnnnnnnnnnnnnnnnnnnnnnnnnnnnnnnnnnnnnnnnnnnnnnnnnnnnnnnnnnnnnnnnnnnnnnnnnnnnnnnnnnnnnnnnnnnnnnnnnnnnnnnnnnnnnnnnnnnnnnnnnnnnnnnnnnnnnnnnnnnnnnnnnnnnnnnnnnnnnnnnnnnnnnnnnnnnnnnnnnnnnnnnnnnnnnnnnnnnnnnnnnnnnnnnnnnnnnnnnnnnnnnnnnnnnnnnnnnnnnnnnnnnnnnnnnnnnnnnnnnnnnnnnnnnnnnnnnnnnnnnnnnnnnnnnnnnnnnnnnnnnnnnnnnnnnnnnnnnnnnnnnnnnnnnnnnnnnnnnnnnnnnnnnnnnnnnnnnnnnnnnnnnnnnnnnnnnnnnnnnnnnnnnnnnnnnnnnnnnnnnnnnnnnnnnnnnnnnnnnnnnnnnnnnnnnnnnnnnnnnnnnnnnnnnnnnnnnnnnnnnnnnnnnnnnnnnnnnnnnnnnnnnnnnnnnnnnnnnnnnnnnnnnnnnnnnnnnnnnnnnnnnnnnnnnnnnnnnnnnnnnnnnnnnnnnnnnnnnnnnnnnnnnnnnnnnnnnnnnnnnnnnnnnnnnnnnnnnnnnnnnnnnnnnnnnnnnnnnnnnnnnnnnnnnnnnnnnnnnnnnnnnnnnnnnnnnnnnnnnnnnnnnnnnnnnnnnnnnnnnnnnnnnnnnnnnnnnnnnnnnnnnnnnnnnnnnnnnnnnnnnnnnnnnnnnnnnnnnnnnnnnnnnnnnnnnnnnnnnnnnnnnnnnnnnnnnnnnnnnnnnnnnnnnnnnnnnnnnnnnnnnnnnnnnnnnnnnnnnnnnnnnnnnnnnnnnnnnnnnnnnnnnnnnnnnnnnnnnnnnnnnnnnnnnnnnnnnnnnnnnnnnnnnnnnnnnnnnnnnnnnnnnnnnnnnnnnnnnnnnnnnnnnnnnnnnnnnnnnnnnnnnnnnnnnnnnnnnnnnnnnnnnnnnnnnnnnnnnnnnnnnnnnnnnnnnnnnnnnnnnnnnnnnnnnnnnnnnnnnnnnnnnnnnnnnnnnnnnnnnnnnnnnnnnnnnnnnnnnnnnnnnnnnnnnnnnnnnnnnnnnnnnnnnnnnnnnnnnnnnnnnnnnnnnnnnnnnnnnnnnnnnnnnnnnnnnnnnnnnnnnnnnnnnnnnnnnnnnnnnnnnnnnnnnnnnnnnnnnnnnnnnnnnnnnnnnnnnnnnnnnnnnnnnnnnnnnnnnnnnnnnnnnnnnnnnnnnnnnnnnnnnnnnnnnnnnnnnnnnnnnnnnnnnnnnnnnnnnnnnnnnnnnnnnnnnnnnnnnnnnnnnnnnnnnnnnnnnnnnnnnnnnnnnnnnnnnnnnnnnnnnnnnnnnnnnnnnnnnnnnnnnnnnnnnnnnnnnnnnnnnnnnnnnnnnnnnnnnnnnnnnnnnnnnnnnnnnnnnnnnnnnnnnnnnnnnnnnnnnnnnnnnnnnnnnnnnnnnnnnnnnnnnnnnnnnnnnnnnnnnnnnnnnnnnnnnnnnnnnnnnnnnnnnnnnnnnnnnnnnnnnnnnnnnnnnnnnnnnnnnnnnnnnnnnnnnnnnnnnnnnnnnnnnnnnnnnnnnnnnnnnnnnnnnnnnnnnnnnnnnnnnnnnnnnnnnnnnnnnnnnnnnnnnnnnnnnnnnnnnnnnnnnnnnnnnnnnnnnnnnnnnnnnnnnnnnnnnnnnnnnnnnnnnnnnnnnnnnnnnnnnnnnnnnnnnnnnnnnnnnnnnnnnnnnnnnnnnnnnnnnnnnnnnnnnnnnnnnnnnnnnnnnnnnnnnnnnnnnnnnnnnnnnnnnnnnnnnnnnnnnnnnnnnnnnnnnnnnnnnnnnnnnnnnnnnnnnnnnnnnnnnnnnnnnnnnnnnnnnnnnnnnnnnnnnnnnnnnnnnnnnnnnnnnnnnnnnnnnnnnnnnnnnnnnnnnnnnnnnnnnnnnnnnnnnnnnnnnnnnnnnnnnnnnnnnnnnnnnnnnnnnnnnnnnnnnnnnnnnnnnnnnnnnnnnnnnnnnnnnnnnnnnnnnnnnnnnnnnnnnnnnnnnnnnnnnnnnnnnnnnnnnnnnnnnnnnnnnnnnnnnnnnnnnnnnnnnnnnnnnnnnnnnnnnnnnnnnnnnnnnnnnnnnnnnnnnnnnnnnnnnnnnnnnnnnnnnnnnnnnnnnnnnnnnnnnnnnnnnnnnnnnnnnnnnnnnnnnnnnnnnnnnnnnnnnnnnnnnnnnnnnnnnnnnnnnnnnnnnnnnnnnnnnnnnnnnnnnnnnnnnnnnnnnnnnnnnnnnnnnnnnnnnnnnnnnnnnnnnnnnnnnnnnnnnnnnnnnnnnnnnnnnnnnnnnnnnnnnnnnnnnnnnnnnnnnnnnnnnnnnnnnnnnnnnnnnnnnnnnnnnnnnnnnnnnnnnnnnnnnnnnnnnnnnnnnnnnnnnnnnnnnnnnnnnnnnnnnnnnnnnnnnnnnnnnnnnnnnnnnnnnnnnnnnnnnnnnnnnnnnnnnnnnnnnnnnnnnnnnnnnnnnnnnnnnnnnnnnnnnnnnnnnnnnnnnnnnnnnnnnnnnnnnnnnnnnnnnnnnnnnnnnnnnnnnnnnnnnnnnnnnnnnnnnnnnnnnnnnnnnnnnnnnnnnnnnnnnnnnnnnnnnnnnnnnnnnnnnnnnnnnnnnnnnnnnnnnnnnnnnnnnnnnnnnnnnnnnnnnnnnnnnnnnnnnnnnnnnnnnnnnnnnnnnnnnnnnnnnnnnnnnnnnnnnnnnnnnnnnnnnnnnnnnnnnnnnnnnnnnnnnnnnnnnnnnnnnnnnnnnnnnnnnnnnnnnnnnnnnnnnnnnnnnnnnnnnnnnnnnnnnnnnnnnnnnnnnnnnnnnnnnnnnnnnnnnnnnnnnnnnnnnnnnnnnnnnnnnnnnnnnnnnnnnnnnnnnnnnnnnnnnnnnnnnnnnnnnnnnnnnnnnnnnnnnnnnnnnnnnnnnnnnnnnnnnnnnnnnnnnnnnnnnnnnnnnnnnnnnnnnnnnnnnnnnnnnnnnnnnnnnnnnnnnnnnnnnnnnnnnnnnnnnnnnnnnnnnnnnnnnnnnnnnnnnnnnnnnnnnnnnnnnnnnnnnnnnnnnnnnnnnnnnnnnnnnnnnnnnnnnnnnnnnnnnnnnnnnnnnnnnnnnnnnnnnnnnnnnnnnnnnnnnnnnnnnnnnnnnnnnnnnnnnnnnnnnnnnnnnnnnnnnnnnnnnnnnnnnnnnnnnnnnnnnnnnnnnnnnnnnnnnnnnnnnnnnnnnnnnnnnnnnnnnnnnnnnnnnnnnnnnnnnnnnnnnnnnnnnnnnnnnnnnnnnnnnnnnnnnnnnnnnnnnnnnnnnnnnnnnnnnnnnnnnnnnnnnnnnnnnnnnnnnnnnnnnnnnnnnnnnnnnnnnnnnnnnnnnnnnnnnnnnnnnnnnnnnnnnnnnnnnnnnnnnnnnnnnnnnnnnnnnnnnnnnnnnnnnnnnnnnnnnnnnnnnnnnnnnnnnnnnnnnnnnnnnnnnnnnnnnnnnnnnnnnnnnnnnnnnnnnnnnnnnnnnnnnnnnnnnnnnnnnnnnnnnnnnnnnnnnnnnnnnnnnnnnnnnnnnnnnnnnnnnnnnnnnnnnnnnnnnnnnnnnnnnnnnnnnnnnnnnnnnnnnnnnnnnnnnnnnnnnnnnnnnnnnnnnnnnnnnnnnnnnnnnnnnnnnnnnnnnnnnnnnnnnnnnnnnnnnnnnnnnnnnnnnnnnnnnnnnnnnnnnnnnnnnnnnnnnnnnnnnnnnnnnnnnnnnnnnnnnnnnnnnnnnnnnnnnnnnnnnnnnnnnnnnnnnnnnnnnnnnnnnnnnnnnnnnnnnnnnnnnnnnnnnnnnnnnnnnnnnnnnnnnnnnnnnnnnnnnnnnnnnnnnnnnnnnnnnnnnnnnnnnnnnnnnnnnnnnnnnnnnnnnnnnnnnnnnnnnnnnnnnnnnnnnnnnnnnnnnnnnnnnnnnnnnnnnnnnnnnnnnnnnnnnnnnnnnnnnnnnnnnnnnnnnnnnnnnnnnnnnnnnnnnnnnnnnnnnnnnnnnnnnnnnnnnnnnnnnnnnnnnnnnnnnnnnnnnnnnnnnnnnnnnnnnnnnnnnnnnnnnnnnnnnnnnnnnnnnnnnnnnnnnnnnnnnnnnnnnnnnnnnnnnnnnnnnnnnnnnnnnnnnnnnnnnnnnnnnnnnnnnnnnnnnnnnnnnnnnnnnnnnnnnnnnnnnnnnnnnnnnnnnnnnnnnnnnnnnnnnnnnnnnnnnnnnnnnnnnnnnnnnnnnnnnnnnnnnnnnnnnnnnnnnnnnnnnnnnnnnnnnnnnnnnnnnnnnnnnnnnnnnnnnnnnnnnnnnnnnnnnnnnnnnnnnnnnnnnnnnnnnnnnnnnnnnnnnnnnnnnnnnnnnnnnnnnnnnnnnnnnnnnnnnnnnnnnnnnnnnnnnnnnnnnnnnnnnnnnnnnnnnnnnnnnnnnnnnnnnnnnnnnnnnnnnnnnnnnnnnnnnnnnnnnnnnnnnnnnnnnnnnnnnnnnnnnnnnnnnnnnnnnnnnnnnnnnnnnnnnnnnnnnnnnnnnnnnnnnnnnnnnnnnnnnnnnnnnnnnnnnnnnnnnnnnnnnnnnnnnnnnnnnnnnnnnnnnnnnnnnnnnnnnnnnnnnnnnnnnnnnnnnnnnnnnnnnnnnnnnnnnnnnnnnnnnnnnnnnnnnnnnnnnnnnnnnnnnnnnnnnnnnnnnnnnnnnnnnnnnnnnnnnnnnnnnnnnnnnnnnnnnnnnnnnnnnnnnnnnnnnnnnnnnnnnnnnnnnnnnnnnnnnnnnnnnnnnnnnnnnnnnnnnnnnnnnnnnnnnnnnnnnnnnnnnnnnnnnnnnnnnnnnnnnnnnnnnnnnnnnnnnnnnnnnnnnnnnnnnnnnnnnnnnnnnnnnnnnnnnnnnnnnnnnnnnnnnnnnnnnnnnnnnnnnnnnnnnnnnnnnnnnnnnnnnnnnnnnnnnnnnnnnnnnnnnnnnnnnnnnnnnnnnnnnnnnnnnnnnnnnnnnnnnnnnnnnnnnnnnnnnnnnnnnnnnnnnnnnnnnnnnnnnnnnnnnnnnnnnnnnnnnnnnnnnnnnnnnnnnnnnnnnnnnnnnnnnnnnnnnnnnnnnnnnnnnnnnnnnnnnnnnnnnnnnnnnnnnnnnnnnnnnnnnnnnnnnnnnnnnnnnnnnnnnnnnnnnnnnnnnnnnnnnnnnnnnnnnnnnnnnnnnnnnnnnnnnnnnnnnnnnnnnnnnnnnnnnnnnnnnnnnnnnnnnnnnnnnnnnnnnnnnnnnnnnnnnnnnnnnnnnnnnnnnnnnnnnnnnnnnnnnnnnnnnnnnnnnnnnnnnnnnnnnnnnnnnnnnnnnnnnnnnnnnnnnnnnnnnnnnnnnnnnnnnnnnnnnnnnnnnnnnnnnnnnnnnnnnnnnnnnnnnnnnnnnnnnnnnnnnnnnnnnnnnnnnnnnnnnnnnnnnnnnnnnnnnnnnnnnnnnnnnnnnnnnnnnnnnnnnnnnnnnnnnnnnnnnnnnnnnnnnnnnnnnnnnnnnnnnnnnnnnnnnnnnnnnnnnnnnnnnnnnnnnnnnnnnnnnnnnnnnnnnnnnnnnnnnnnnnnnnnnnnnnnnnnnnnnnnnnnnnnnnnnnnnnnnnnnnnnnnnnnnnnnnnnnnnnnnnnnnnnnnnnnnnnnnnnnnnnnnnnnnnnnnnnnnnnnnnnnnnnnnnnnnnnnnnnnnnnnnnnnnnnnnnnnnnnnnnnnnnnnnnnnnnnnnnnnnnnnnnnnnnnnnnnnnnnnnnnnnnnnnnnnnnnnnnnnnnnnnnnnnnnnnnnnnnnnnnnnnnnnnnnnnnnnnnnnnnnnnnnnnnnnnnnnnnnnnnnnnnnnnnnnnnnnnnnnnnnnnnnnnnnnnnnnnnnnnnnnnnnnnnnnnnnnnnnnnnnnnnnnnnnnnnnnnnnnnnnnnnnnnnnnnnnnnnnnnnnnnnnnnnnnnnnnnnnnnnnnnnnnnnnnnnnnnnnnnnnnnnnnnnnnnnnnnnnnnnnnnnnnnnnnnnnnnnnnnnnnnnnnnnnnnnnnnnnnnnnnnnnnnnnnnnnnnnnnnnnnnnnnnnnnnnnnnnnnnnnnnnnnnnnnnnnnnnnnnnnnnnnnnnnnnnnnnnnnnnnnnnnnnnnnnnnnnnnnnnnnnnnnnnnnnnnnnnnnnnnnnnnnnnnnnnnnnnnnnnnnnnnnnnnnnnnnnnnnnnnnnnnnnnnnnnnnnnnnnnnnnnnnnnnnnnnnnnnnnnnnnnnnnnnnnnnnnnnnnnnnnnnnnnnnnnnnnnnnnnnnnnnnnnnnnnnnnnnnnnnnnnnnnnnnnnnnnnnnnnnnnnnnnnnnnnnnnnnnnnnnnnnnnnnnnnnnnnnnnnnnnnnnnnnnnnnnnnnnnnnnnnnnnnnnnnnnnnnnnnnnnnnnnnnnnnnnnnnnnnnnnnnnnnnnnnnnnnnnnnnnnnnnnnnnnnnnnnnnnnnnnnnnnnnnnnnnnnnnnnnnnnnnnnnnnnnnnnnnnnnnnnnnnnnnnnnnnnnnnnnnnnnnnnnnnnnnnnnnnnnnnnnnnnnnnnnnnnnnnnnnnnnnnnnnnnnnnnnnnnnnnnnnnnnnnnnnnnnnnnnnnnnnnnnnnnnnnnnnnnnnnnnnnnnnnnnnnnnnnnnnnnnnnnnnnnnnnnnnnnnnnnnnnnnnnnnnnnnnnnnnnnnnnnnnnnnnnnnnnnnnnnnnnnnnnnnnnnnnnnnnnnnnnnnnnnnnnnnnnnnnnnnnnnnnnnnnnnnnnnnnnnnnnnnnnnnnnnnnnnnnnnnnnnnnnnnnnnnnnnnnnnnnnnnnnnnnnnnnnnnnnnnnnnnnnnnnnnnnnnnnnnnnnnnnnnnnnnnnnnnnnnnnnnnnnnnnnnnnnnnnnnnnnnnnnnnnnnnnnnnnnnnnnnnnnnnnnnnnnnnnnnnnnnnnnnnnnnnnnnnnnnnnnnnnnnnnnnnnnnnnnnnnnnnnnnnnnnnnnnnnnnnnnnnnnnnnnnnnnnnnnnnnnnnnnnnnnnnnnnnnnnnnnnnnnnnnnnnnnnnnnnnnnnnnnnnnnnnnnnnnnnnnnnnnnnnnnnnnnnnnnnnnnnnnnnnnnnnnnnnnnnnnnnnnnnnnnnnnnnnnnnnnnnnnnnnnnnnnnnnnnnnnnnnnnnnnnnnnnnnnnnnnnnnnnnnnnnnnnnnnnnnnnnnnnnnnnnnnnnnnnnnnnnnnnnnnnnnnnnnnnnnnnnnnnnnnnnnnnnnnnnnnnnnnnnnnnnnnnnnnnnnnnnnnnnnnnnnnnnnnnnnnnnnnnnnnnnnnnnnnnnnnnnnnnnnnnnnnnnnnnnnnnnnnnnnnnnnnnnnnnnnnnnnnnnnnnnnnnnnnnnnnnnnnnnnnnnnnnnnnnnnnnnnnnnnnnnnnnnnnnnnnnnnnnnnnnnnnnnnnnnnnnnnnnnnnnnnnnnnnnnnnnnnnnnnnnnnnnnnnnnnnnnnnnnnnnnnnnnnnnnnnnnnnnnnnnnnnnnnnnnnnnnnnnnnnnnnnnnnnnnnnnnnnnnnnnnnnnnnnnnnnnnnnnnnnnnnnnnnnnnnnnnnnnnnnnnnnnnnnnnnnnnnnnnnnnnnnnnnnnnnnnnnnnnnnnnnnnnnnnnnnnnnnnnnnnnnnnnnnnnnnnnnnnnnnnnnnnnnnnnnnnnnnnnnnnnnnnnnnnnnnnnnnnnnnnnnnnnnnnnnnnnnnnnnnnnnnnnnnnnnnnnnnnnnnnnnnnnnnnnnnnnnnnnnnnnnnnnnnnnnnnnnnnnnnnnnnnnnnnnnnnnnnnnnnnnnnnnnnnnnnnnnnnnnnnnnnnnnnnnnnnnnnnnnnnnnnnnnnnnnnnnnnnnnnnnnnnnnnnnnnnnnnnnnnnnnnnnnnnnnnnnnnnnnnnnnnnnnnnnnnnnnnnnnnnnnnnnnnnnnnnnnnnnnnnnnnnnnnnnnnnnnnnnnnnnnnnnnnnnnnnnnnnnnnnnnnnnnnnnnnnnnnnnnnnnnnnnnnnnnnnnnnnnnnnnnnnnnnnnnnnnnnnnnnnnnnnnnnnnnnnnnnnnnnnnnnnnnnnnnnnnnnnnnnnnnnnnnnnnnnnnnnnnnnnnnnnnnnnnnnnnnnnnnnnnnnnnnnnnnnnnnnnnnnnnnnnnnnnnnnnnnnnnnnnnnnnnnnnnnnnnnnnnnnnnnnnnnnnnnnnnnnnnnnnnnnnnnnnnnnnnnnnnnnnnnnnnnnnnnnnnnnnnnnnnnnnnnnnnnnnnnnnnnnnnnnnnnnnnnnnnnnnnnnnnnnnnnnnnnnnnnnnnnnnnnnnnnnnnnnnnnnnnnnnnnnnnnnnnnnnnnnnnnnnnnnnnnnnnnnnnnnnnnnnnnnnnnnnnnnnnnnnnnnnnnnnnnnnnnnnnnnnnnnnnnnnnnnnnnnnnnnnnnnnnnnnnnnnnnnnnnnnnnnnnnnnnnnnnnnnnnnnnnnnnnnnnnnnnnnnnnnnnnnnnnnnnnnnnnnnnnnnnnnnnnnnnnnnnnnnnnnnnnnnnnnnnnnnnnnnnnnnnnnnnnnnnnnnnnnnnnnnnnnnnnnnnnnnnnnnnnnnnnnnnnnnnnnnnnnnnnnnnnnnnnnnnnnnnnnnnnnnnnnnnnnnnnnnnnnnnnnnnnnnnnnnnnnnnnnnnnnnnnnnnnnnnnnnnnnnnnnnnnnnnnnnnnnnnnnnnnnnnnnnnnnnnnnnnnnnnnnnnnnnnnnnnnnnnnnnnnnnnnnnnnnnnnnnnnnnnnnnnnnnnnnnnnnnnnnnnnnnnnnnnnnnnnnnnnnnnnnnnnnnnnnnnnnnnnnnnnnnnnnnnnnnnnnnnnnnnnnnnnnnnnnnnnnnnnnnnnnnnnnnnnnnnnnnnnnnnnnnnnnnnnnnnnnnnnnnnnnnnnnnnnnnnnnnnnnnnnnnnnnnnnnnnnnnnnnnnnnnnnnnnnnnnnnnnnnnnnnnnnnnnnnnnnnnnnnnnnnnnnnnnnnnnnnnnnnnnnnnnnnnnnnnnnnnnnnnnnnnnnnnnnnnnnnnnnnnnnnnnnnnnnnnnnnnnnnnnnnnnnnnnnnnnnnnnnnnnnnnnnnnnnnnnnnnnnnnnnnnnnnnnnnnnnnnnnnnnnnnnnnnnnnnnnnnnnnnnnnnnnnnnnnnnnnnnnnnnnnnnnnnnnnnnnnnnnnnnnnnnnnnnnnnnnnnnnnnnnnnnnnnnnnnnnnnnnnnnnnnnnnnnnnnnnnnnnnnnnnnnnnnnnnnnnnnnnnnnnnnnnnnnnnnnnnnnnnnnnnnnnnnnnnnnnnnnnnnnnnnnnnnnnnnnnnnnnnnnnnnnnnnnnnnnnnnnnnnnnnnnnnnnnnnnnnnnnnnnnnnnnnnnnnnnnnnnnnnnnnnnnnnnnnnnnnnnnnnnnnnnnnnnnnnnnnnnnnnnnnnnnnnnnnnnnnnnnnnnnnnnnnnnnnnnnnnnnnnnnnnnnnnnnnnnnnnnnnnnnnnnnnnnnnnnnnnnnnnnnnnnnnnnnnnnnnnnnnnnnnnnnnnnnnnnnnnnnnnnnnnnnnnnnnnnnnnnnnnnnnnnnnnnnnnnnnnnnnnnnnnnnnnnnnnnnnnnnnnnnnnnnnnnnnnnnnnnnnnnnnnnnnnnnnnnnnnnnnnnnnnnnnnnnnnnnnnnnnnnnnnnnnnnnnnnnnnnnnnnnnnnnnnnnnnnnnnnnnnnnnnnnnnnnnnnnnnnnnnnnnnnnnnnnnnnnnnnnnnnnnnnnnnnnnnnnnnnnnnnnnnnnnnnnnnnnnnnnnnnnnnnnnnnnnnnnnnnnnnnnnnnnnnnnnnnnnnnnnnnnnnnnnnnnnnnnnnnnnnnnnnnnnnnnnnnnnnnnnnnnnnnnnnnnnnnnnnnnnnnnnnnnnnnnnnnnnnnnnnnnnnnnnnnnnnnnnnnnnnnnnnnnnnnnnnnnnnnnnnnnnnnnnnnnnnnnnnnnnnnnnnnnnnnnnnnnnnnnnnnnnnnnnnnnnnnnnnnnnnnnnnnnnnnnnnnnnnnnnnnnnnnnnnnnnnnnnnnnnnnnnnnnnnnnnnnnnnnnnnnnnnnnnnnnnnnnnnnnnnnnnnnnnnnnnnnnnnnnnnnnnnnnnnnnnnnnnnnnnnnnnnnnnnnnnnnnnnnnnnnnnnnnnnnnnnnnnnnnnnnnnnnnnnnnnnnnnnnnnnnnnnnnnnnnnnnnnnnnnnnnnnnnnnnnnnnnnnnnnnnnnnnnnnnnnnnnnnnnnnnnnnnnnnnnnnnnnnnnnnnnnnnnnnnnnnnnnnnnnnnnnnnnnnnnnnnnnnnnnnnnnnnnnnnnnnnnnnnnnnnnnnnnnnnnnnnnnnnnnnnnnnnnnnnnnnnnnnnnnnnnnnnnnnnnnnnnnnnnnnnnnnnnnnnnnnnnnnnnnnnnnnnnnnnnnnnnnnnnnnnnnnnnnnnnnnnnnnnnnnnnnnnnnnnnnnnnnnnnnnnnnnnnnnnnnnnnnnnnnnnnnnnnnnnnnnnnnnnnnnnnnnnnnnnnnnnnnnnnnnnnnnnnnnnnnnnnnnnnnnnnnnnnnnnnnnnnnnnnnnnnnnnnnnnnnnnnnnnnnnnnnnnnnnnnnnnnnnnnnnnnnnnnnnnnnnnnnnnnnnnnnnnnnnnnnnnnnnnnnnnnnnnnnnnnnnnnnnnnnnnnnnnnnnnnnnnnnnnnnnnnnnnnnnnnnnnnnnnnnnnnnnnnnnnnnnnnnnnnnnnnnnnnnnnnnnnnnnnnnnnnnnnnnnnnnnnnnnnnnnnnnnnnnnnnnnnnnnnnnnnnnnnnnnnnnnnnnnnnnnnnnnnnnnnnnnnnnnnnnnnnnnnnnnnnnnnnnnnnnnnnnnnnnnnnnnnnnnnnnnnnnnnnnnnnnnnnnnnnnnnnnnnnnnnnnnnnnnnnnnnnnnnnnnnnnnnnnnnnnnnnnnnnnnnnnnnnnnnnnnnnnnnnnnnnnnnnnnnnnnnnnnnnnnnnnnnnnnnnnnnnnnnnnnnnnnnnnnnnnnnnnnnnnnnnnnnnnnnnnnnnnnnnnnnnnnnnnnnnnnnnnnnnnnnnnnnnnnnnnnnnnnnnnnnnnnnnnnnnnnnnnnnnnnnnnnnnnnnnnnnnnnnnnnnnnnnnnnnnnnnnnnnnnnnnnnnnnnnnnnnnnnnnnnnnnnnnnnnnnnnnnnnnnnnnnnnnnnnnnnnnnnnnnnnnnnnnnnnnnnnnnnnnnnnnnnnnnnnnnnnnnnnnnnnnnnnnnnnnnnnnnnnnnnnnnnnnnnnnnnnnnnnnnnnnnnnnnnnnnnnnnnnnnnnnnnnnnnnnnnnnnnnnnnnnnnnnnnnnnnnnnnnnnnnnnnnnnnnnnnnnnnnnnnnnnnnnnnnnnnnnnnnnnnnnnnnnnnnnnnnnnnnnnnnnnnnnnnnnnnnnnnnnnnnnnnnnnnnnnnnnnnnnnnnnnnnnnnnnnnnnnnnnnnnnnnnnnnnnnnnnnnnnnnnnnnnnnnnnnnnnnnnnnnnnnnnnnnnnnnnnnnnnnnnnnnnnnnnnnnnnnnnnnnnnnnnnnnnnnnnnnnnnnnnnnnnnnnnnnnnnnnnnnnnnnnnnnnnnnnnnnnnnnnnnnnnnnnnnnnnnnnnnnnnnnnnnnnnnnnnnnnnnnnnnnnnnnnnnnnnnnnnnnnnnnnnnnnnnnnnnnnnnnnnnnnnnnnnnnnnnnnnnnnnnnnnnnnnnnnnnnnnnnnnnnnnnnnnnnnnnnnnnnnnnnnnnnnnnnnnnnnnnnnnnnnnnnnnnnnnnnnnnnnnnnnnnnnnnnnnnnnnnnnnnnnnnnnnnnnnnnnnnnnnnnnnnnnnnnnnnnnnnnnnnnnnnnnnnnnnnnnnnnnnnnnnnnnnnnnnnnnnnnnnnnnnnnnnnnnnnnnnnnnnnnnnnnnnnnnnnnnnnnnnnnnnnnnnnnnnnnnnnnnnnnnnnnnnnnnnnnnnnnnnnnnnnnnnnnnnnnnnnnnnnnnnnnnnnnnnnnnnnnnnnnnnnnnnnnnnnnnnnnnnnnnnnnnnnnnnnnnnnnnnnnnnnnnnnnnnnnnnnnnnnnnnnnnnnnnnnnnnnnnnnnnnnnnnnnnnnnnnnnnnnnnnnnnnnnnnnnnnnnnnnnnnnnnnnnnnnnnnnnnnnnnnnnnnnnnnnnnnnnnnnnnnnnnnnnnnnnnnnnnnnnnnnnnnnnnnnnnnnnnnnnnnnnnnnnnnnnnnnnnnnnnnnnnnnnnnnnnnnnnnnnnnnnnnnnnnnnnnnnnnnnnnnnnnnnnnnnnnnnnnnnnnnnnnnnnnnnnnnnnnnnnnnnnnnnnnnnnnnnnnnnnnnnnnnnnnnnnnnnnnnnnnnnnnnnnnnnnnnnnnnnnnnnnnnnnnnnnnnnnnnnnnnnnnnnnnnnnnnnnnnnnnnnnnnnnnnnnnnnnnnnnnnnnnnnnnnnnnnnnnnnnnnnnnnnnnnnnnnnnnnnnnnnnnnnnnnnnnnnnnnnnnnnnnnnnnnnnnnnnnnnnnnnnnnnnnnnnnnnnnnnnnnnnnnnnnnnnnnnnnnnnnnnnnnnnnnnnnnnnnnnnnnnnnnnnnnnnnnnnnnnnnnnnnnnnnnnnnnnnnnnnnnnnnnnnnnnnnnnnnnnnnnnnnnnnnnnnnnnnnnnnnnnnnnnnnnnnnnnnnnnnnnnnnnnnnnnnnnnnnnnnnnnnnnnnnnnnnnnnnnnnnnnnnnnnnnnnnnnnnnnnnnnnnnnnnnnnnnnnnnnnnnnnnnnnnnnnnnnnnnnnnnnnnnnnnnnnnnnnnnnnnnnnnnnnnnnnnnnnnnnnnnnnnnnnnnnnnnnnnnnnnnnnnnnnnnnnnnnnnnnnnnnnnnnnnnnnnnnnnnnnnnnnnnnnnnnnnnnnnnnnnnnnnnnnnnnnnnnnnnnnnnnnnnnnnnnnnnnnnnnnnnnnnnnnnnnnnnnnnnnnnnnnnnnnnnnnnnnnnnnnnnnnnnnnnnnnnnnnnnnnnnnnnnnnnnnnnnnnnnnnnnnnnnnnnnnnnnnnnnnnnnnnnnnnnnnnnnnnnnnnnnnnnnnnnnnnnnnnnnnnnnnnnnnnnnnnnnnnnnnnnnnnnnnnnnnnnnnnnnnnnnnnnnnnnnnnnnnnnnnnnnnnnnnnnnnnnnnnnnnnnnnnnnnnnnnnnnnnnnnnnnnnnnnnnnnnnnnnnnnnnnnnnnnnnnnnnnnnnnnnnnnnnnnnnnnnnnnnnnnnnnnnnnnnnnnnnnnnnnnnnnnnnnnnnnnnnnnnnnnnnnnnnnnnnnnnnnnnnnnnnnnnnnnnnnnnnnnnnnnnnnnnnnnnnnnnnnnnnnnnnnnnnnnnnnnnnnnnnnnnnnnnnnnnnnnnnnnnnnnnnnnnnnnnnnnnnnnnnnnnnnnnnnnnnnnnnnnnnnnnnnnnnnnnnnnnnnnnnnnnnnnnnnnnnnnnnnnnnnnnnnnnnnnnnnnnnnnnnnnnnnnnnnnnnnnnnnnnnnnnnnnnnnnnnnnnnnnnnnnnnnnnnnnnnnnnnnnnnnnnnnnnnnnnnnnnnnnnnnnnnnnnnnnnnnnnnnnnnnnnnnnnnnnnnnnnnnnnnnnnnnnnnnnnnnnnnnnnnnnnnnnnnnnnnnnnnnnnnnnnnnnnnnnnnnnnnnnnnnnnnnnnnnnnnnnnnnnnnnnnnnnnnnnnnnnnnnnnnnnnnnnnnnnnnnnnnnnnnnnnnnnnnnnnnnnnnnnnnnnnnnnnnnnnnnnnnnnnnnnnnnnnnnnnnnnnnnnnnnnnnnnnnnnnnnnnnnnnnnnnnnnnnnnnnnnnnnnnnnnnnnnnnnnnnnnnnnnnnnnnnnnnnnnnnnnnnnnnnnnnnnnnnnnnnnnnnnnnnnnnnnnnnnnnnnnnnnnnnnnnnnnnnnnnnnnnnnnnnnnnnnnnnnnnnnnnnnnnnnnnnnnnnnnnnnnnnnnnnnnnnnnnnnnnnnnnnnnnnnnnnnnnnnnnnnnnnnnnnnnnnnnnnnnnnnnnnnnnnnnnnnnnnnnnnnnnnnnnnnnnnnnnnnnnnnnnnnnnnnnnnnnnnnnnnnnnnnnnnnnnnnnnnnnnnnnnnnnnnnnnnnnnnnnnnnnnnnnnnnnnnnnnnnnnnnnnnnnnnnnnnnnnnnnnnnnnnnnnnnnnnnnnnnnnnnnnnnnnnnnnnnnnnnnnnnnnnnnnnnnnnnnnnnnnnnnnnnnnnnnnnnnnnnnnnnnnnnnnnnnnnnnnnnnnnnnnnnnnnnnnnnnnnnnnnnnnnnnnnnnnnnnnnnnnnnnnnnnnnnnnnnnnnnnnnnnnnnnnnnnnnnnnnnnnnnnnnnnnnnnnnnnnnnnnnnnnnnnnnnnnnnnnnnnnnnnnnnnnnnnnnnnnnnnnnnnnnnnnnnnnnnnnnnnnnnnnnnnnnnnnnnnnnnnnnnnnnnnnnnnnnnnnnnnnnnnnnnnnnnnnnnnnnnnnnnnnnnnnnnnnnnnnnnnnnnnnnnnnnnnnnnnnnnnnnnnnnnnnnnnnnnnnnnnnnnnnnnnnnnnnnnnnnnnnnnnnnnnnnnnnnnnnnnnnnnnnnnnnnnnnnnnnnnnnnnnnnnnnnnnnnnnnnnnnnnnnnnnnnnnnnnnnnnnnnnnnnnnnnnnnnnnnnnnnnnnnnnnnnnnnnnnnnnnnnnnnnnnnnnnnnnnnnnnnnnnnnnnnnnnnnnnnnnnnnnnnnnnnnnnnnnnnnnnnnnnnnnnnnnnnnnnnnnnnnnnnnnnnnnnnnnnnnnnnnnnnnnnnnnnnnnnnnnnnnnnnnnnnnnnnnnnnnnnnnnnnnnnnnnnnnnnnnnnnnnnnnnnnnnnnnnnnnnnnnnnnnnnnnnnnnnnnnnnnnnnnnnnnnnnnnnnnnnnnnnnnnnnnnnnnnnnnnnnnnnnnnnnnnnnnnnnnnnnnnnnnnnnnnnnnnnnnnnnnnnnnnnnnnnnnnnnnnnnnnnnnnnnnnnnnnnnnnnnnnnnnnnnnnnnnnnnnnnnnnnnnnnnnnnnnnnnnnnnnnnnnnnnnnnnnnnnnnnnnnnnnnnnnnnnnnnnnnnnnnnnnnnnnnnnnnnnnnnnnnnnnnnnnnnnnnnnnnnnnnnnnnnnnnnnnnnnnnnnnnnnnnnnnnnnnnnnnnnnnnnnnnnnnnnnnnnnnnnnnnnnnnnnnnnnnnnnnnnnnnnnnnnnnnnnnnnnnnnnnnnnnnnnnnnnnnnnnnnnnnnnnnnnnnnnnnnnnnnnnnnnnnnnnnnnnnnnnnnnnnnnnnnnnnnnnnnnnnnnnnnnnnnnnnnnnnnnnnnnnnnnnnnnnnnnnnnnnnnnnnnnnnnnnnnnnnnnnnnnnnnnnnnnnnnnnnnnnnnnnnnnnnnnnnnnnnnnnnnnnnnnnnnnnnnnnnnnnnnnnnnnnnnnnnnnnnnnnnnnnnnnnnnnnnnnnnnnnnnnnnnnnnnnnnnnnnnnnnnnnnnnnnnnnnnnnnnnnnnnnnnnnnnnnnnnnnnnnnnnnnnnnnnnnnnnnnnnnnnnnnnnnnnnnnnnnnnnnnnnnnnnnnnnnnnnnnnnnnnnnnnnnnnnnnnnnnnnnnnnnnnnnnnnnnnnnnnnnnnnnnnnnnnnnnnnnnnnnnnnnnnnnnnnnnnnnnnnnnnnnnnnnnnnnnnnnnnnnnnnnnnnnnnnnnnnnnnnnnnnnnnnnnnnnnnnnnnnnnnnnnnnnnnnnnnnnnnnnnnnnnnnnnnnnnnnnnnnnnnnnnnnnnnnnnnnnnnnnnnnnnnnnnnnnnnnnnnnnnnnnnnnnnnnnnnnnnnnnnnnnnnnnnnnnnnnnnnnnnnnnnnnnnnnnnnnnnnnnnnnnnnnnnnnnnnnnnnnnnnnnnnnnnnnnnnnnnnnnnnnnnnnnnnnnnnnnnnnnnnnnnnnnnnnnnnnnnnnnnnnnnnnnnnnnnnnnnnnnnnnnnnnnnnnnnnnnnnnnnnnnnnnnnnnnnnnnnnnnnnnnnnnnnnnnnnnnnnnnnnnnnnnnnnnnnnnnnnnnnnnnnnnnnnnnnnnnnnnnnnnnnnnnnnnnnnnnnnnnnnnnnnnnnnnnnnnnnnnnnnnnnnnnnnnnnnnnnnnnnnnnnnnnnnnnnnnnnnnnnnnnnnnnnnnnnnnnnnnnnnnnnnnnnnnnnnnnnnnnnnnnnnnnnnnnnnnnnnnnnnnnnnnnnnnnnnnnnnnnnnnnnnnnnnnnnnnnnnnnnnnnnnnnnnnnnnnnnnnnnnnnnnnnnnnnnnnnnnnnnnnnnnnnnnnnnnnnnnnnnnnnnnnnnnnnnnnnnnnnnnnnnnnnnnnnnnnnnnnnnnnnnnnnnnnnnnnnnnnnnnnnnnnnnnnnnnnnnnnnnnnnnnnnnnnnnnnnnnnnnnnnnnnnnnnnnnnnnnnnnnnnnnnnnnnnnnnnnnnnnnnnnnnnnnnnnnnnnnnnnnnnnnnnnnnnnnnnnnnnnnnnnnnnnnnnnnnnnnnnnnnnnnnnnnnnnnnnnnnnnnnnnnnnnnnnnnnnnnnnnnnnnnnnnnnnnnnnnnnnnnnnnnnnnnnnnnnnnnnnnnnnnnnnnnnnnnnnnnnnnnnnnnnnnnnnnnnnnnnnnnnnnnnnnnnnnnnnnnnnnnnnnnnnnnnnnnnnnnnnnnnnnnnnnnnnnnnnnnnnnnnnnnnnnnnnnnnnnnnnnnnnnnnnnnnnnnnnnnnnnnnnnnnnnnnnnnnnnnnnnnnnnnnnnnnnnnnnnnnnnnnnnnnnnnnnnnnnnnnnnnnnnnnnnnnnnnnnnnnnnnnnnnnnnnnnnnnnnnnnnnnnnnnnnnnnnnnnnnnnnnnnnnnnnnnnnnnnnnnnnnnnnnnnnnnnnnnnnnnnnnnnnnnnnnnnnnnnnnnnnnnnnnnnnnnnnnnnnnnnnnnnnnnnnnnnnnnnnnnnnnnnnnnnnnnnnnnnnnnnnnnnnnnnnnnnnnnnnnnnnnnnnnnnnnnnnnnnnnnnnnnnnnnnnnnnnnnnnnnnnnnnnnnnnnnnnnnnnnnnnnnnnnnnnnnnnnnnnnnnnnnnnnnnnnnnnnnnnnnnnnnnnnnnnnnnnnnnnnnnnnnnnnnnnnnnnnnnnnnnnnnnnnnnnnnnnnnnnnnnnnnnnnnnnnnnnnnnnnnnnnnnnnnnnnnnnnnnnnnnnnnnnnnnnnnnnnnnnnnnnnnnnnnnnnnnnnnnnnnnnnnnnnnnnnnnnnnnnnnnnnnnnnnnnnnnnnnnnnnnnnnnnnnnnnnnnnnnnnnnnnnnnnnnnnnnnnnnnnnnnnnnnnnnnnnnnnnnnnnnnnnnnnnnnnnnnnnnnnnnnnnnnnnnnnnnnnnnnnnnnnnnnnnnnnnnnnnnnnnnnnnnnnnnnnnnnnnnnnnnnnnnnnnnnnnnnnnnnnnnnnnnnnnnnnnnnnnnnnnnnnnnnnnnnnnnnnnnnnnnnnnnnnnnnnnnnnnnnnnnnnnnnnnnnnnnnnnnnnnnnnnnnnnnnnnnnnnnnnnnnnnnnnnnnnnnnnnnnnnnnnnnnnnnnnnnnnnnnnnnnnnnnnnnnnnnnnnnnnnnnnnnnnnnnnnnnnnnnnnnnnnnnnnnnnnnnnnnnnnnnnnnnnnnnnnnnnnnnnnnnnnnnnnnnnnnnnnnnnnnnnnnnnnnnnnnnnnnnnnnnnnnnnnnnnnnnnnnnnnnnnnnnnnnnnnnnnnnnnnnnnnnnnnnnnnnnnnnnnnnnnnnnnnnnnnnnnnnnnnnnnnnnnnnnnnnnnnnnnnnnnnnnnnnnnnnnnnnnnnnnnnnnnnnnnnnnnnnnnnnnnnnnnnnnnnnnnnnnnnnnnnnnnnnnnnnnnnnnnnnnnnnnnnnnnnnnnnnnnnnnnnnnnnnnnnnnnnnnnnnnnnnnnnnnnnnnnnnnnnnnnnnnnnnnnnnnnnnnnnnnnnnnnnnnnnnnnnnnnnnnnnnnnnnnnnnnnnnnnnnnnnnnnnnnnnnnnnnnnnnnnnnnnnnnnnnnnnnnnnnnnnnnnnnnnnnnnnnnnnnnnnnnnnnnnnnnnnnnnnnnnnnnnnnnnnnnnnnnnnnnnnnnnnnnnnnnnnnnnnnnnnnnnnnnnnnnnnnnnnnnnnnnnnnnnnnnnnnnnnnnnnnnnnnnnnnnnnnnnnnnnnnnnnnnnnnnnnnnnnnnnnnnnnnnnnnnnnnnnnnnnnnnnnnnnnnnnnnnnnnnnnnnnnnnnnnnnnnnnnnnnnnnnnnnnnnnnnnnnnnnnnnnnnnnnnnnnnnnnnnnnnnnnnnnnnnnnnnnnnnnnnnnnnnnnnnnnnnnnnnnnnnnnnnnnnnnnnnnnnnnnnnnnnnnnnnnnnnnnnnnnnnnnnnnnnnnnnnnnnnnnnnnnnnnnnnnnnnnnnnnnnnnnnnnnnnnnnnnnnnnnnnnnnnnnnnnnnnnnnnnnnnnnnnnnnnnnnnnnnnnnnnnnnnnnnnnnnnnnnnnnnnnnnnnnnnnnnnnnnnnnnnnnnnnnnnnnnnnnnnnnnnnnnnnnnnnnnnnnnnnnnnnnnnnnnnnnnnnnnnnnnnnnnnnnnnnnnnnnnnnnnnnnnnnnnnnnnnnnnnnnnnnnnnnnnnnnnnnnnnnnnnnnnnnnnnnnnnnnnnnnnnnnnnnnnnnnnnnnnnnnnnnnnnnnnnnnnnnnnnnnnnnnnnnnnnnnnnnnnnnnnnnnnnnnnnnnnnnnnnnnnnnnnnnnnnnnnnnnnnnnnnnnnnnnnnnnnnnnnnnnnnnnnnnnnnnnnnnnnnnnnnnnnnnnnnnnnnnnnnnnnnnnnnnnnnnnnnnnnnnnnnnnnnnnnnnnnnnnnnnnnnnnnnnnnnnnnnnnnnnnnnnnnnnnnnnnnnnnnnnnnnnnnnnnnnnnnnnnnnnnnnnnnnnnnnnnnnnnnnnnnnnnnnnnnnnnnnnnnnnnnnnnnnnnnnnnnnnnnnnnnnnnnnnnnnnnnnnnnnnnnnnnnnnnnnnnnnnnnnnnnnnnnnnnnnnnnnnnnnnnnnnnnnnnnnnnnnnnnnnnnnnnnnnnnnnnnnnnnnnnnnnnnnnnnnnnnnnnnnnnnnnnnnnnnnnnnnnnnnnnnnnnnnnnnnnnnnnnnnnnnnnnnnnnnnnnnnnnnnnnnnnnnnnnnnnnnnnnnnnnnnnnnnnnnnnnnnnnnnnnnnnnnnnnnnnnnnnnnnnnnnnnnnnnnnnnnnnnnnnnnnnnnnnnnnnnnnnnnnnnnnnnnnnnnnnnnnnnnnnnnnnnnnnnnnnnnnnnnnnnnnnnnnnnnnnnnnnnnnnnnnnnnnnnnnnnnnnnnnnnnnnnnnnnnnnnnnnnnnnnnnnnnnnnnnnnnnnnnnnnnnnnnnnnnnnnnnnnnnnnnnnnnnnnnnnnnnnnnnnnnnnnnnnnnnnnnnnnnnnnnnnnnnnnnnnnnnnnnnnnnnnnnnnnnnnnnnnnnnnnnnnnnnnnnnnnnnnnnnnnnnnnnnnnnnnnnnnnnnnnnnnnnnnnnnnnnnnnnnnnnnnnnnnnnnnnnnnnnnnnnnnnnnnnnnnnnnnnnnnnnnnnnnnnnnnnnnnnnnnnnnnnnnnnnnnnnnnnnnnnnnnnnnnnnnnnnnnnnnnnnnnnnnnnnnnnnnnnnnnnnnnnnnnnnnnnnnnnnnnnnnnnnnnnnnnnnnnnnnnnnnnnnnnnnnnnnnnnnnnnnnnnnnnnnnnnnnnnnnnnnnnnnnnnnnnnnnnnnnnnnnnnnnnnnnnnnnnnnnnnnnnnnnnnnnnnnnnnnnnnnnnnnnnnnnnnnnnnnnnnnnnnnnnnnnnnnnnnnnnnnnnnnnnnnnnnnnnnnnnnnnnnnnnnnnnnnnnnnnnnnnnnnnnnnnnnnnnnnnnnnnnnnnnnnnnnnnnnnnnnnnnnnnnnnnnnnnnnnnnnnnnnnnnnnnnnnnnnnnnnnnnnnnnnnnnnnnnnnnnnnnnnnnnnnnnnnnnnnnnnnnnnnnnnnnnnnnnnnnnnnnnnnnnnnnnnnnnnnnnnnnnnnnnnnnnnnnnnnnnnnnnnnnnnnnnnnnnnnnnnnnnnnnnnnnnnnnnnnnnnnnnnnnnnnnnnnnnnnnnnnnnnnnnnnnnnnnnnnnnnnnnnnnnnnnnnnnnnnnnnnnnnnnnnnnnnnnnnnnnnnnnnnnnnnnnnnnnnnnnnnnnnnnnnnnnnnnnnnnnnnnnnnnnnnnnnnnnnnnnnnnnnnnnnnnnnnnnnnnnnnnnnnnnnnnnnnnnnnnnnnnnnnnnnnnnnnnnnnnnnnnnnnnnnnnnnnnnnnnnnnnnnnnnnnnnnnnnnnnnnnnnnnnnnnnnnnnnnnnnnnnnnnnnnnnnnnnnnnnnnnnnnnnnnnnnnnnnnnnnnnnnnnnnnnnnnnnnnnnnnnnnnnnnnnnnnnnnnnnnnnnnnnnnnnnnnnnnnnnnnnnnnnnnnnnnnnnnnnnnnnnnnnnnnnnnnnnnnnnnnnnnnnnnnnnnnnnnnnnnnnnnnnnnnnnnnnnnnnnnnnnnnnnnnnnnnnnnnnnnnnnnnnnnnnnnnnnnnnnnnnnnnnnnnnnnnnnnnnnnnnnnnnnnnnnnnnnnnnnnnnnnnnnnnnnnnnnnnnnnnnnnnnnnnnnnnnnnnnnnnnnnnnnnnnnnnnnnnnnnnnnnnnnnnnnnnnnnnnnnnnnnnnnnnnnnnnnnnnnnnnnnnnnnnnnnnnnnnnnnnnnnnnnnnnnnnnnnnnnnnnnnnnnnnnnnnnnnnnnnnnnnnnnnnnnnnnnnnnnnnnnnnnnnnnnnnnnnnnnnnnnnnnnnnnnnnnnnnnnnnnnnnnnnnnnnnnnnnnnnnnnnnnnnnnnnnnnnnnnnnnnnnnnnnnnnnnnnnnnnnnnnnnnnnnnnnnnnnnnnnnnnnnnnnnnnnnnnnnnnnnnnnnnnnnnnnnnnnnnnnnnnnnnnnnnnnnnnnnnnnnnnnnnnnnnnnnnnnnnnnnnnnnnnnnnnnnnnnnnnnnnnnnnnnnnnnnnnnnnnnnnnnnnnnnnnnnnnnnnnnnnnnnnnnnnnnnnnnnnnnnnnnnnnnnnnnnnnnnnnnnnnnnnnnnnnnnnnnnnnnnnnnnnnnnnnnnnnnnnnnnnnnnnnnnnnnnnnnnnnnnnnnnnnnnnnnnnnnnnnnnnnnnnnnnnnnnnnnnnnnnnnnnnnnnnnnnnnnnnnnnnnnnnnnnnnnnnnnnnnnnnnnnnnnnnnnnnnnnnnnnnnnnnnnnnnnnnnnnnnnnnnnnnnnnnnnnnnnnnnnnnnnnnnnnnnnnnnnnnnnnnnnnnnnnnnnnnnnnnnnnnnnnnnnnnnnnnnnnnnnnnnnnnnnnnnnnnnnnnnnnnnnnnnnnnnnnnnnnnnnnnnnnnnnnnnnnnnnnnnnnnnnnnnnnnnnnnnnnnnnnnnnnnnnnnnnnnnnnnnnnnnnnnnnnnnnnnnnnnnnnnnnnnnnnnnnnnnnnnnnnnnnnnnnnnnnnnnnnnnnnnnnnnnnnnnnnnnnnnnnnnnnnnnnnnnnnnnnnnnnnnnnnnnnnnnnnnnnnnnnnnnnnnnnnnnnnnnnnnnnnnnnnnnnnnnnnnnnnnnnnnnnnnnnnnnnnnnnnnnnnnnnnnnnnnnnnnnnnnnnnnnnnnnnnnnnnnnnnnnnnnnnnnnnnnnnnnnnnnnnnnnnnnnnnnnnnnnnnnnnnnnnnnnnnnnnnnnnnnnnnnnnnnnnnnnnnnnnnnnnnnnnnnnnnnnnnnnnnnnnnnnnnnnnnnnnnnnnnnnnnnnnnnnnnnnnnnnnnnnnnnnnnnnnnnnnnnnnnnnnnnnnnnnnnnnnnnnnnnnnnnnnnnnnnnnnnnnnnnnnnnnnnnnnnnnnnnnnnnnnnnnnnnnnnnnnnnnnnnnnnnnnnnnnnnnnnnnnnnnnnnnnnnnnnnnnnnnnnnnnnnnnnnnnnnnnnnnnnnnnnnnnnnnnnnnnnnnnnnnnnnnnnnnnnnnnnnnnnnnnnnnnnnnnnnnnnnnnnnnnnnnnnnnnnnnnnnnnnnnnnnnnnnnnnnnnnnnnnnnnnnnnnnnnnnnnnnnnnnnnnnnnnnnnnnnnnnnnnnnnnnnnnnnnnnnnnnnnnnnnnnnnnnnnnnnnnnnnnnnnnnnnnnnnnnnnnnnnnnnnnnnnnnnnnnnnnnnnnnnnnnnnnnnnnnnnnnnnnnnnnnnnnnnnnnnnnnnnnnnnnnnnnnnnnnnnnnnnnnnnnnnnnnnnnnnnnnnnnnnnnnnnnnnnnnnnnnnnnnnnnnnnnnnnnnnnnnnnnnnnnnnnnnnnnnnnnnnnnnnnnnnnnnnnnnnnnnnnnnnnnnnnnnnnnnnnnnnnnnnnnnnnnnnnnnnnnnnnnnnnnnnnnnnnnnnnnnnnnnnnnnnnnnnnnnnnnnnnnnnnnnnnnnnnnnnnnnnnnnnnnnnnnnnnnnnnnnnnnnnnnnnnnnnnnnnnnnnnnnnnnnnnnnnnnnnnnnnnnnnnnnnnnnnnnnnnnnnnnnnnnnnnnnnnnnnnnnnnnnnnnnnnnnnnnnnnnnnnnnnnnnnnnnnnnnnnnnnnnnnnnnnnnnnnnnnnnnnnnnnnnnnnnnnnnnnnnnnnnnnnnnnnnnnnnnnnnnnnnnnnnnnnnnnnnnnnnnnnnnnnnnnnnnnnnnnnnnnnnnnnnnnnnnnnnnnnnnnnnnnnnnnnnnnnnnnnnnnnnnnnnnnnnnnnnnnnnnnnnnnnnnnnnnnnnnnnnnnnnnnnnnnnnnnnnnnnnnnnnnnnnnnnnnnnnnnnnnnnnnnnnnnnnnnnnnnnnnnnnnnnnnnnnnnnnnnnnnnnnnnnnnnnnnnnnnnnnnnnnnnnnnnnnnnnnnnnnnnnnnnnnnnnnnnnnnnnnnnnnnnnnnnnnnnnnnnnnnnnnnnnnnnnnnnnnnnnnnnnnnnnnnnnnnnnnnnnnnnnnnnnnnnnnnnnnnnnnnnnnnnnnnnnnnnnnnnnnnnnnnnnnnnnnnnnnnnnnnnnnnnnnnnnnnnnnnnnnnnnnnnnnnnnnnnnnnnnnnnnnnnnnnnnnnnnnnnnnnnnnnnnnnnnnnnnnnnnnnnnnnnnnnnnnnnnnnnnnnnnnnnnnnnnnnnnnnnnnnnnnnnnnnnnnnnnnnnnnnnnnnnnnnnnnnnnnnnnnnnnnnnnnnnnnnnnnnnnnnnnnnnnnnnnnnnnnnnnnnnnnnnnnnnnnnnnnnnnnnnnnnnnnnnnnnnnnnnnnnnnnnnnnnnnnnnnnnnnnnnnnnnnnnnnnnnnnnnnnnnnnnnnnnnnnnnnnnnnnnnnnnnnnnnnnnnnnnnnnnnnnnnnnnnnnnnnnnnnnnnnnnnnnnnnnnnnnnnnnnnnnnnnnnnnnnnnnnnnnnnnnnnnnnnnnnnnnnnnnnnnnnnnnnnnnnnnnnnnnnnnnnnnnnnnnnnnnnnnnnnnnnnnnnnnnnnnnnnnnnnnnnnnnnnnnnnnnnnnnnnnnnnnnnnnnnnnnnnnnnnnnnnnnnnnnnnnnnnnnnnnnnnnnnnnnnnnnnnnnnnnnnnnnnnnnnnnnnnnnnnnnnnnnnnnnnnnnnnnnnnnnnnnnnnnnnnnnnnnnnnnnnnnnnnnnnnnnnnnnnnnnnnnnnnnnnnnnnnnnnnnnnnnnnnnnnnnnnnnnnnnnnnnnnnnnnnnnnnnnnnnnnnnnnnnnnnnnnnnnnnnnnnnnnnnnnnnnnnnnnnnnnnnnnnnnnnnnnnnnnnnnnnnnnnnnnnnnnnnnnnnnnnnnnnnnnnnnnnnnnnnnnnnnnnnnnnnnnnnnnnnnnnnnnnnnnnnnnnnnnnnnnnnnnnnnnnnnnnnnnnnnnnnnnnnnnnnnnnnnnnnnnnnnnnnnnnnnnnnnnnnnnnnnnnnnnnnnnnnnnnnnnnnnnnnnnnnnnnnnnnnnnnnnnnnnnnnnnnnnnnnnnnnnnnnnnnnnnnnnnnnnnnnnnnnnnnnnnnnnnnnnnnnnnnnnnnnnnnnnnnnnnnnnnnnnnnnnnnnnnnnnnnnnnnnnnnnnnnnnnnnnnnnnnnnnnnnnnnnnnnnnnnnnnnnnnnnnnnnnnnnnnnnnnnnnnnnnnnnnnnnnnnnnnnnnnnnnnnnnnnnnnnnnnnnnnnnnnnnnnnnnnnnnnnnnnnnnnnnnnnnnnnnnnnnnnnnnnnnnnnnnnnnnnnnnnnnnnnnnnnnnnnnnnnnnnnnnnnnnnnnnnnnnnnnnnnnnnnnnnnnnnnnnnnnnnnnnnnnnnnnnnnnnnnnnnnnnnnnnnnnnnnnnnnnnnnnnnnnnnnnnnnnnnnnnnnnnnnnnnnnnnnnnnnnnnnnnnnnnnnnnnnnnnnnnnnnnnnnnnnnnnnnnnnnnnnnnnnnnnnnnnnnnnnnnnnnnnnnnnnnnnnnnnnnnnnnnnnnnnnnnnnnnnnnnnnnnnnnnnnnnnnnnnnnnnnnnnnnnnnnnnnnnnnnnnnnnnnnnnnnnnnnnnnnnnnnnnnnnnnnnnnnnnnnnnnnnnnnnnnnnnnnnnnnnnnnnnnnnnnnnnnnnnnnnnnnnnnnnnnnnnnnnnnnnnnnnnnnnnnnnnnnnnnnnnnnnnnnnnnnnnnnnnnnnnnnnnnnnnnnnnnnnnnnnnnnnnnnnnnnnnnnnnnnnnnnnnnnnnnnnnnnnnnnnnnnnnnnnnnnnnnnnnnnnnnnnnnnnnnnnnnnnnnnnnnnnnnnnnnnnnnnnnnnnnnnnnnnnnnnnnnnnnnnnnnnnnnnnnnnnnnnnnnnnnnnnnnnnnnnnnnnnnnnnnnnnnnnnnnnnnnnnnnnnnnnnnnnnnnnnnnnnnnnnnnnnnnnnnnnnnnnnnnnnnnnnnnnnnnnnnnnnnnnnnnnnnnnnnnnnnnnnnnnnnnnnnnnnnnnnnnnnnnnnnnnnnnnnnnnnnnnnnnnnnnnnnnnnnnnnnnnnnnnnnnnnnnnnnnnnnnnnnnnnnnnnnnnnnnnnnnnnnnnnnnnnnnnnnnnnnnnnnnnnnnnnnnnnnnnnnnnnnnnnnnnnnnnnnnnnnnnnnnnnnnnnnnnnnnnnnnnnnnnnnnnnnnnnnnnnnnnnnnnnnnnnnnnnnnnnnnnnnnnnnnnnnnnnnnnnnnnnnnnnnnnnnnnnnnnnnnnnnnnnnnnnnnnnnnnnnnnnnnnnnnnnnnnnnnnnnnnnnnnnnnnnnnnnnnnnnnnnnnnnnnnnnnnnnnnnnnnnnnnnnnnnnnnnnnnnnnnnnnnnnnnnnnnnnnnnnnnnnnnnnnnnnnnnnnnnnnnnnnnnnnnnnnnnnnnnnnnnnnnnnnnnnnnnnnnnnnnnnnnnnnnnnnnnnnnnnnnnnnnnnnnnnnnnnnnnnnnnnnnnnnnnnnnnnnnnnnnnnnnnnnnnnnnnnnnnnnnnnnnnnnnnnnnnnnnnnnnnnnnnnnnnnnnnnnnnnnnnnnnnnnnnnnnnnnnnnnnnnnnnnnnnnnnnnnnnnnnnnnnnnnnnnnnnnnnnnnnnnnnnnnnnnnnnnnnnnnnnnnnnnnnnnnnnnnnnnnnnnnnnnnnnnnnnnnnnnnnnnnnnnnnnnnnnnnnnnnnnnnnnnnnnnnnnnnnnnnnnnnnnnnnnnnnnnnnnnnnnnnnnnnnnnnnnnnnnnnnnnnnnnnnnnnnnnnnnnnnnnnnnnnnnnnnnnnnnnnnnnnnnnnnnnnnnnnnnnnnnnnnnnnnnnnnnnnnnnnnnnnnnnnnnnnnnnnnnnnnnnnnnnnnnnnnnnnnnnnnnnnnnnnnnnnnnnnnnnnnnnnnnnnnnnnnnnnnnnnnnnnnnnnnnnnnnnnnnnnnnnnnnnnnnnnnnnnnnnnnnnnnnnnnnnnnnnnnnnnnnnnnnnnnnnnnnnnnnnnnnnnnnnnnnnnnnnnnnnnnnnnnnnnnnnnnnnnnnnnnnnnnnnnnnnnnnnnnnnnnnnnnnnnnnnnnnnnnnnnnnnnnnnnnnnnnnnnnnnnnnnnnnnnnnnnnnnnnnnnnnnnnnnnnnnnnnnnnnnnnnnnnnnnnnnnnnnnnnnnnnnnnnnnnnnnnnnnnnnnnnnnnnnnnnnnnnnnnnnnnnnnnnnnnnnnnnnnnnnnnnnnnnnnnnnnnnnnnnnnnnnnnnnnnnnnnnnnnnnnnnnnnnnnnnnnnnnnnnnnnnnnnnnnnnnnnnnnnnnnnnnnnnnnnnnnnnnnnnnnnnnnnnnnnnnnnnnnnnnnnnnnnnnnnnnnnnnnnnnnnnnnnnnnnnnnnnnnnnnnnnnnnnnnnnnnnnnnnnnnnnnnnnnnnnnnnnnnnnnnnnnnnnnnnnnnnnnnnnnnnnnnnnnnnnnnnnnnnnnnnnnnnnnnnnnnnnnnnnnnnnnnnnnnnnnnnnnnnnnnnnnnnnnnnnnnnnnnnnnnnnnnnnnnnnnnnnnnnnnnnnnnnnnnnnnnnnnnnnnnnnnnnnnnnnnnnnnnnnnnnnnnnnnnnnnnnnnnnnnnnnnnnnnnnnnnnnnnnnnnnnnnnnnnnnnnnnnnnnnnnnnnnnnnnnnnnnnnnnnnnnnnnnnnnnnnnnnnnnnnnnnnnnnnnnnnnnnnnnnnnnnnnnnnnnnnnnnnnnnnnnnnnnnnnnnnnnnnnnnnnnnnnnnnnnnnnnnnnnnnnnnnnnnnnnnnnnnnnnnnnnnnnnnnnnnnnnnnnnnnnnnnnnnnnnnnnnnnnnnnnnnnnnnnnnnnnnnnnnnnnnnnnnnnnnnnnnnnnnnnnnnnnnnnnnnnnnnnnnnnnnnnnnnnnnnnnnnnnnnnnnnnnnnnnnnnnnnnnnnnnnnnnnnnnnnnnnnnnnnnnnnnnnnnnnnnnnnnnnnnnnnnnnnnnnnnnnnnnnnnnnnnnnnnnnnnnnnnnnnnnnnnnnnnnnnnnnnnnnnnnnnnnnnnnnnnnnnnnnnnnnnnnnnnnnnnnnnnnnnnnnnnnnnnnnnnnnnnnnnnnnnnnnnnnnnnnnnnnnnnnnnnnnnnnnnnnnnnnnnnnnnnnnnnnnnnnnnnnnnnnnnnnnnnnnnnnnnnnnnnnnnnnnnnnnnnnnnnnnnnnnnnnnnnnnnnnnnnnnnnnnnnnnnnnnnnnnnnnnnnnnnnnnnnnnnnnnnnnnnnnnnnnnnnnnnnnnnnnnnnnnnnnnnnnnnnnnnnnnnnnnnnnnnnnnnnnnnnnnnnnnnnnnnnnnnnnnnnnnnnnnnnnnnnnnnnnnnnnnnnnnnnnnnnnnnnnnnnnnnnnnnnnnnnnnnnnnnnnnnnnnnnnnnnnnnnnnnnnnnnnnnnnnnnnnnnnnnnnnnnnnnnnnnnnnnnnnnnnnnnnnnnnnnnnnnnnnnnnnnnnnnnnnnnnnnnnnnnnnnnnnnnnnnnnnnnnnnnnnnnnnnnnnnnnnnnnnnnnnnnnnnnnnnnnnnnnnnnnnnnnnnnnnnnnnnnnnnnnnnnnnnnnnnnnnnnnnnnnnnnnnnnnnnnnnnnnnnnnnnnnnnnnnnnnnnnnnnnnnnnnnnnnnnnnnnnnnnnnnnnnnnnnnnnnnnnnnnnnnnnnnnnnnnnnnnnnnnnnnnnnnnnnnnnnnnnnnnnnnnnnnnnnnnnnnnnnnnnnnnnnnnnnnnnnnnnnnnnnnnnnnnnnnnnnnnnnnnnnnnnnnnnnnnnnnnnnnnnnnnnnnnnnnnnnnnnnnnnnnnnnnnnnnnnnnnnnnnnnnnnnnnnnnnnnnnnnnnnnnnnnnnnnnnnnnnnnnnnnnnnnnnnnnnnnnnnnnnnnnnnnnnnnnnnnnnnnnnnnnnnnnnnnnnnnnnnnnnnnnnnnnnnnnnnnnnnnnnnnnnnnnnnnnnnnnnnnnnnnnnnnnnnnnnnnnnnnnnnnnnnnnnnnnnnnnnnnnnnnnnnnnnnnnnnnnnnnnnnnnnnnnnnnnnnnnnnnnnnnnnnnnnnnnnnnnnnnnnnnnnnnnnnnnnnnnnnnnnnnnnnnnnnnnnnnnnnnnnnnnnnnnnnnnnnnnnnnnnnnnnnnnnnnnnnnnnnnnnnnnnnnnnnnnnnnnnnnnnnnnnnnnnnnnnnnnnnnnnnnnnnnnnnnnnnnnnnnnnnnnnnnnnnnnnnnnnnnnnnnnnnnnnnnnnnnnnnnnnnnnnnnnnnnnnnnnnnnnnnnnnnnnnnnnnnnnnnnnnnnnnnnnnnnnnnnnnnnnnnnnnnnnnnnnnnnnnnnnnnnnnnnnnnnnnnnnnnnnnnnnnnnnnnnnnnnnnnnnnnnnnnnnnnnnnnnnnnnnnnnnnnnnnnnnnnnnnnnnnnnnnnnnnnnnnnnnnnnnnnnnnnnnnnnnnnnnnnnnnnnnnnnnnnnnnnnnnnnnnnnnnnnnnnnnnnnnnnnnnnnnnnnnnnnnnnnnnnnnnnnnnnnnnnnnnnnnnnnnnnnnnnnnnnnnnnnnnnnnnnnnnnnnnnnnnnnnnnnnnnnnnnnnnnnnnnnnnnnnnnnnnnnnnnnnnnnnnnnnnnnnnnnnnnnnnnnnnnnnnnnnnnnnnnnnnnnnnnnnnnnnnnnnnnnnnnnnnnnnnnnnnnnnnnnnnnnnnnnnnnnnnnnnnnnnnnnnnnnnnnnnnnnnnnnnnnnnnnnnnnnnnnnnnnnnnnnnnnnnnnnnnnnnnnnnnnnnnnnnnnnnnnnnnnnnnnnnnnnnnnnnnnnnnnnnnnnnnnnnnnnnnnnnnnnnnnnnnnnnnnnnnnnnnnnnnnnnnnnnnnnnnnnnnnnnnnnnnnnnnnnnnnnnnnnnnnnnnnnnnnnnnnnnnnnnnnnnnnnnnnnnnnnnnnnnnnnnnnnnnnnnnnnnnnnnnnnnnnnnnnnnnnnnnnnnnnnnnnnnnnnnnnnnnnnnnnnnnnnnnnnnnnnnnnnnnnnnnnnnnnnnnnnnnnnnnnnnnnnnnnnnnnnnnnnnnnnnnnnnnnnnnnnnnnnnnnnnnnnnnnnnnnnnnnnnnnnnnnnnnnnnnnnnnnnnnnnnnnnnnnnnnnnnnnnnnnnnnnnnnnnnnnnnnnnnnnnnnnnnnnnnnnnnnnnnnnnnnnnnnnnnnnnnnnnnnnnnnnnnnnnnnnnnnnnnnnnnnnnnnnnnnnnnnnnnnnnnnnnnnnnnnnnnnnnnnnnnnnnnnnnnnnnnnnnnnnnnnnnnnnnnnnnnnnnnnnnnnnnnnnnnnnnnnnnnnnnnnnnnnnnnnnnnnnnnnnnnnnnnnnnnnnnnnnnnnnnnnnnnnnnnnnnnnnnnnnnnnnnnnnnnnnnnnnnnnnnnnnnnnnnnnnnnnnnnnnnnnnnnnnnnnnnnnnnnnnnnnnnnnnnnnnnnnnnnnnnnnnnnnnnnnnnnnnnnnnnnnnnnnnnnnnnnnnnnnnnnnnnnnnnnnnnnnnnnnnnnnnnnnnnnnnnnnnnnnnnnnnnnnnnnnnnnnnnnnnnnnnnnnnnnnnnnnnnnnnnnnnnnnnnnnnnnnnnnnnnnnnnnnnnnnnnnnnnnnnnnnnnnnnnnnnnnnnnnnnnnnnnnnnnnnnnnnnnnnnnnnnnnnnnnnnnnnnnnnnnnnnnnnnnnnnnnnnnnnnnnnnnnnnnnnnnnnnnnnnnnnnnnnnnnnnnnnnnnnnnnnnnnnnnnnnnnnnnnnnnnnnnnnnnnnnnnnnnnnnnnnnnnnnnnnnnnnnnnnnnnnnnnnnnnnnnnnnnnnnnnnnnnnnnnnnnnnnnnnnnnnnnnnnnnnnnnnnnnnnnnnnnnnnnnnnnnnnnnnnnnnnnnnnnnnnnnnnnnnnnnnnnnnnnnnnnnnnnnnnnnnnnnnnnnnnnnnnnnnnnnnnnnnnnnnnnnnnnnnnnnnnnnnnnnnnnnnnnnnnnnnnnnnnnnnnnnnnnnnnnnnnnnnnnnnnnnnnnnnnnnnnnnnnnnnnnnnnnnnnnnnnnnnnnnnnnnnnnnnnnnnnnnnnnnnnnnnnnnnnnnnnnnnnnnnnnnnnnnnnnnnnnnnnnnnnnnnnnnnnnnnnnnnnnnnnnnnnnnnnnnnnnnnnnnnnnnnnnnnnnnnnnnnnnnnnnnnnnnnnnnnnnnnnnnnnnnnnnnnnnnnnnnnnnnnnnnnnnnnnnnnnnnnnnnnnnnnnnnnnnnnnnnnnnnnnnnnnnnnnnnnnnnnnnnnnnnnnnnnnnnnnnnnnnnnnnnnnnnnnnnnnnnnnnnnnnnnnnnnnnnnnnnnnnnnnnnnnnnnnnnnnnnnnnnnnnnnnnnnnnnnnnnnnnnnnnnnnnnnnnnnnnnnnnnnnnnnnnnnnnnnnnnnnnnnnnnnnnnnnnnnnnnnnnnnnnnnnnnnnnnnnnnnnnnnnnnnnnnnnnnnnnnnnnnnnnnnnnnnnnnnnnnnnnnnnnnnnnnnnnnnnnnnnnnnnnnnnnnnnnnnnnnnnnnnnnnnnnnnnnnnnnnnnnnnnnnnnnnnnnnnnnnnnnnnnnnnnnnnnnnnnnnnnnnnnnnnnnnnnnnnnnnnnnnnnnnnnnnnnnnnnnnnnnnnnnnnnnnnnnnnnnnnnnnnnnnnnnnnnnnnnnnnnnnnnnnnnnnnnnnnnnnnnnnnnnnnnnnnnnnnnnnnnnnnnnnnnnnnnnnnnnnnnnnnnnnnnnnnnnnnnnnnnnnnnnnnnnnnnnnnnnnnnnnnnnnnnnnnnnnnnnnnnnnnnnnnnnnnnnnnnnnnnnnnnnnnnnnnnnnnnnnnnnnnnnnnnnnnnnnnnnnnnnnnnnnnnnnnnnnnnnnnnnnnnnnnnnnnnnnnnnnnnnnnnnnnnnnnnnnnnnnnnnnnnnnnnnnnnnnnnnnnnnnnnnnnnnnnnnnnnnnnnnnnnnnnnnnnnnnnnnnnnnnnnnnnnnnnnnnnnnnnnnnnnnnnnnnnnnnnnnnnnnnnnnnnnnnnnnnnnnnnnnnnnnnnnnnnnnnnnnnnnnnnnnnnnnnnnnnnnnnnnnnnnnnnnnnnnnnnnnnnnnnnnnnnnnnnnnnnnnnnnnnnnnnnnnnnnnnnnnnnnnnnnnnnnnnnnnnnnnnnnnnnnnnnnnnnnnnnnnnnnnnnnnnnnnnnnnnnnnnnnnnnnnnnnnnnnnnnnnnnnnnnnnnnnnnnnnnnnnnnnnnnnnnnnnnnnnnnnnnnnnnnnnnnnnnnnnnnnnnnnnnnnnnnnnnnnnnnnnnnnnnnnnnnnnnnnnnnnnnnnnnnnnnnnnnnnnnnnnnnnnnnnnnnnnnnnnnnnnnnnnnnnnnnnnnnnnnnnnnnnnnnnnnnnnnnnnnnnnnnnnnnnnnnnnnnnnnnnnnnnnnnnnnnnnnnnnnnnnnnnnnnnnnnnnnnnnnnnnnnnnnnnnnnnnnnnnnnnnnnnnnnnnnnnnnnnnnnnnnnnnnnnnnnnnnnnnnnnnnnnnnnnnnnnnnnnnnnnnnnnnnnnnnnnnnnnnnnnnnnnnnnnnnnnnnnnnnnnnnnnnnnnnnnnnnnnnnnnnnnnnnnnnnnnnnnnnnnnnnnnnnnnnnnnnnnnnnnnnnnnnnnnnnnnnnnnnnnnnnnnnnnnnnnnnnnnnnnnnnnnnnnnnnnnnnnnnnnnnnnnnnnnnnnnnnnnnnnnnnnnnnnnnnnnnnnnnnnnnnnnnnnnnnnnnnnnnnnnnnnnnnnnnnnnnnnnnnnnnnnnnnnnnnnnnnnnnnnnnnnnnnnnnnnnnnnnnnnnnnnnnnnnnnnnnnnnnnnnnnnnnnnnnnnnnnnnnnnnnnnnnnnnnnnnnnnnnnnnnnnnnnnnnnnnnnnnnnnnnnnnnnnnnnnnnnnnnnnnnnnnnnnnnnnnnnnnnnnnnnnnnnnnnnnnnnnnnnnnnnnnnnnnnnnnnnnnnnnnnnnnnnnnnnnnnnnnnnnnnnnnnnnnnnnnnnnnnnnnnnnnnnnnnnnnnnnnnnnnnnnnnnnnnnnnnnnnnnnnnnnnnnnnnnnnnnnnnnnnnnnnnnnnnnnnnnnnnnnnnnnnnnnnnnnnnnnnnnnnnnnnnnnnnnnnnnnnnnnnnnnnnnnnnnnnnnnnnnnnnnnnnnnnnnnnnnnnnnnnnnnnnnnnnnnnnnnnnnnnnnnnnnnnnnnnnnnnnnnnnnnnnnnnnnnnnnnnnnnnnnnnnnnnnnnnnnnnnnnnnnnnnnnnnnnnnnnnnnnnnnnnnnnnnnnnnnnnnnnnnnnnnnnnnnnnnnnnnnnnnnnnnnnnnnnnnnnnnnnnnnnnnnnnnnnnnnnnnnnnnnnnnnnnnnnnnnnnnnnnnnnnnnnnnnnnnnnnnnnnnnnnnnnnnnnnnnnnnnnnnnnnnnnnnnnnnnnnnnnnnnnnnnnnnnnnnnnnnnnnnnnnnnnnnnnnnnnnnnnnnnnnnnnnnnnnnnnnnnnnnnnnnnnnnnnnnnnnnnnnnnnnnnnnnnnnnnnnnnnnnnnnnnnnnnnnnnnnnnnnnnnnnnnnnnnnnnnnnnnnnnnnnnnnnnnnnnnnnnnnnnnnnnnnnnnnnnnnnnnnnnnnnnnnnnnnnnnnnnnnnnnnnnnnnnnnnnnnnnnnnnnnnnnnnnnnnnnnnnnnnnnnnnnnnnnnnnnnnnnnnnnnnnnnnnnnnnnnnnnnnnnnnnnnnnnnnnnnnnnnnnnnnnnnnnnnnnnnnnnnnnnnnnnnnnnnnnnnnnnnnnnnnnnnnnnnnnnnnnnnnnnnnnnnnnnnnnnnnnnnnnnnnnnnnnnnnnnnnnnnnnnnnnnnnnnnnnnnnnnnnnnnnnnnnnnnnnnnnnnnnnnnnnnnnnnnnnnnnnnnnnnnnnnnnnnnnnnnnnnnnnnnnnnnnnnnnnnnnnnnnnnnnnnnnnnnnnnnnnnnnnnnnnnnnnnnnnnnnnnnnnnnnnnnnnnnnnnnnnnnnnnnnnnnnnnnnnnnnnnnnnnnnnnnnnnnnnnnnnnnnnnnnnnnnnnnnnnnnnnnnnnnnnnnnnnnnnnnnnnnnnnnnnnnnnnnnnnnnnnnnnnnnnnnnnnnnnnnnnnnnnnnnnnnnnnnnnnnnnnnnnnnnnnnnnnnnnnnnnnnnnnnnnnnnnnnnnnnnnnnnnnnnnnnnnnnnnnnnnnnnnnnnnnnnnnnnnnnnnnnnnnnnnnnnnnnnnnnnnnnnnnnnnnnnnnnnnnnnnnnnnnnnnnnnnnnnnnnnnnnnnnnnnnnnnnnnnnnnnnnnnnnnnnnnnnnnnnnnnnnnnnnnnnnnnnnnnnnnnnnnnnnnnnnnnnnnnnnnnnnnnnnnnnnnnnnnnnnnnnnnnnnnnnnnnnnnnnnnnnnnnnnnnnnnnnnnnnnnnnnnnnnnnnnnnnnnnnnnnnnnnnnnnnnnnnnnnnnnnnnnnnnnnnnnnnnnnnnnnnnnnnnnnnnnnnnnnnnnnnnnnnnnnnnnnnnnnnnnnnnnnnnnnnnnnnnnnnnnnnnnnnnnnnnnnnnnnnnnnnnnnnnnnnnnnnnnnnnnnnnnnnnnnnnnnnnnnnnnnnnnnnnnnnnnnnnnnnnnnnnnnnnnnnnnnnnnnnnnnnnnnnnnnnnnnnnnnnnnnnnnnnnnnnnnnnnnnnnnnnnnnnnnnnnnnnnnnnnnnnnnnnnnnnnnnnnnnnnnnnnnnnnnnnnnnnnnnnnnnnnnnnnnnnnnnnnnnnnnnnnnnnnnnnnnnnnnnnnnnnnnnnnnnnnnnnnnnnnnnnnnnnnnnnnnnnnnnnnnnnnnnnnnnnnnnnnnnnnnnnnnnnnnnnnnnnnnnnnnnnnnnnnnnnnnnnnnnnnnnnnnnnnnnnnnnnnnnnnnnnnnnnnnnnnnnnnnnnnnnnnnnnnnnnnnnnnnnnnnnnnnnnnnnnnnnnnnnnnnnnnnnnnnnnnnnnnnnnnnnnnnnnnnnnnnnnnnnnnnnnnnnnnnnnnnnnnnnnnnnnnnnnnnnnnnnnnnnnnnnnnnnnnnnnnnnnnnnnnnnnnnnnnnnnnnnnnnnnnnnnnnnnnnnnnnnnnnnnnnnnnnnnnnnnnnnnnnnnnnnnnnnnnnnnnnnnnnnnnnnnnnnnnnnnnnnnnnnnnnnnnnnnnnnnnnnnnnnnnnnnnnnnnnnnnnnnnnnnnnnnnnnnnnnnnnnnnnnnnnnnnnnnnnnnnnnnnnnnnnnnnnnnnnnnnnnnnnnnnnnnnnnnnnnnnnnnnnnnnnnnnnnnnnnnnnnnnnnnnnnnnnnnnnnnnnnnnnnnnnnnnnnnnnnnnnnnnnnnnnnnnnnnnnnnnnnnnnnnnnnnnnnnnnnnnnnnnnnnnnnnnnnnnnnnnnnnnnnnnnnnnnnnnnnnnnnnnnnnnnnnnnnnnnnnnnnnnnnnnnnnnnnnnnnnnnnnnnnnnnnnnnnnnnnnnnnnnnnnnnnnnnnnnnnnnnnnnnnnnnnnnnnnnnnnnnnnnnnnnnnnnnnnnnnnnnnnnnnnnnnnnnnnnnnnnnnnnnnnnnnnnnnnnnnnnnnnnnnnnnnnnnnnnnnnnnnnnnnnnnnnnnnnnnnnnnnnnnnnnnnnnnnnnnnnnnnnnnnnnnnnnnnnnnnnnnnnnnnnnnnnnnnnnnnnnnnnnnnnnnnnnnnnnnnnnnnnnnnnnnnnnnnnnnnnnnnnnnnnnnnnnnnnnnnnnnnnnnnnnnnnnnnnnnnnnnnnnnnnnnnnnnnnnnnnnnnnnnnnnnnnnnnnnnnnnnnnnnnnnnnnnnnnnnnnnnnnnnnnnnnnnnnnnnnnnnnnnnnnnnnnnnnnnnnnnnnnnnnnnnnnnnnnnnnnnnnnnnnnnnnnnnnnnnnnnnnnnnnnnnnnnnnnnnnnnnnnnnnnnnnnnnnnnnnnnnnnnnnnnnnnnnnnnnnnnnnnnnnnnnnnnnnnnnnnnnnnnnnnnnnnnnnnnnnnnnnnnnnnnnnnnnnnnnnnnnnnnnnnnnnnnnnnnnnnnnnnnnnnnnnnnnnnnnnnnnnnnnnnnnnnnnnnnnnnnnnnnnnnnnnnnnnnnnnnnnnnnnnnnnnnnnnnnnnnnnnnnnnnnnnnnnnnnnnnnnnnnnnnnnnnnnnnnnnnnnnnnnnnnnnnnnnnnnnnnnnnnnnnnnnnnnnnnnnnnnnnnnnnnnnnnnnnnnnnnnnnnnnnnnnnnnnnnnnnnnnnnnnnnnnnnnnnnnnnnnnnnnnnnnnnnnnnnnnnnnnnnnnnnnnnnnnnnnnnnnnnnnnnnnnnnnnnnnnnnnnnnnnnnnnnnnnnnnnnnnnnnnnnnnnnnnnnnnnnnnnnnnnnnnnnnnnnnnnnnnnnnnnnnnnnnnnnnnnnnnnnnnnnnnnnnnnnnnnnnnnnnnnnnnnnnnnnnnnnnnnnnnnnnnnnnnnnnnnnnnnnnnnnnnnnnnnnnnnnnnnnnnnnnnnnnnnnnnnnnnnnnnnnnnnnnnnnnnnnnnnnnnnnnnnnnnnnnnnnnnnnnnnnnnnnnnnnnnnnnnnnnnnnnnnnnnnnnnnnnnnnnnnnnnnnnnnnnnnnnnnnnnnnnnnnnnnnnnnnnnnnnnnnnnnnnnnnnnnnnnnnnnnnnnnnnnnnnnnnnnnnnnnnnnnnnnnnnnnnnnnnnnnnnnnnnnnnnnnnnnnnnnnnnnnnnnnnnnnnnnnnnnnnnnnnnnnnnnnnnnnnnnnnnnnnnnnnnnnnnnnnnnnnnnnnnnnnnnnnnnnnnnnnnnnnnnnnnnnnnnnnnnnnnnnnnnnnnnnnnnnnnnnnnnnnnnnnnnnnnnnnnnnnnnnnnnnnnnnnnnnnnnnnnnnnnnnnnnnnnnnnnnnnnnnnnnnnnnnnnnnnnnnnnnnnnnnnnnnnnnnnnnnnnnnnnnnnnnnnnnnnnnnnnnnnnnnnnnnnnnnnnnnnnnnnnnnnnnnnnnnnnnnnnnnnnnnnnnnnnnnnnnnnnnnnnnnnnnnnnnnnnnnnnnnnnnnnnnnnnnnnnnnnnnnnnnnnnnnnnnnnnnnnnnnnnnnnnnnnnnnnnnnnnnnnnnnnnnnnnnnnnnnnnnnnnnnnnnnnnnnnnnnnnnnnnnnnnnnnnnnnnnnnnnnnnnnnnnnnnnnnnnnnnnnnnnnnnnnnnnnnnnnnnnnnnnnnnnnnnnnnnnnnnnnnnnnnnnnnnnnnnnnnnnnnnnnnnnnnnnnnnnnnnnnnnnnnnnnnnnnnnnnnnnnnnnnnnnnnnnnnnnnnnnnnnnnnnnnnnnnnnnnnnnnnnnnnnnnnnnnnnnnnnnnnnnnnnnnnnnnnnnnnnnnnnnnnnnnnnnnnnnnnnnnnnnnnnnnnnnnnnnnnnnnnnnnnnnnnnnnnnnnnnnnnnnnnnnnnnnnnnnnnnnnnnnnnnnnnnnnnnnnnnnnnnnnnnnnnnnnnnnnnnnnnnnnnnnnnnnnnnnnnnnnnnnnnnnnnnnnnnnnnnnnnnnnnnnnnnnnnnnnnnnnnnnnnnnnnnnnnnnnnnnnnnnnnnnnnnnnnnnnnnnnnnnnnnnnnnnnnnnnnnnnnnnnnnnnnnnnnnnnnnnnnnnnnnnnnnnnnnnnnnnnnnnnnnnnnnnnnnnnnnnnnnnnnnnnnnnnnnnnnnnnnnnnnnnnnnnnnnnnnnnnnnnnnnnnnnnnnnnnnnnnnnnnnnnnnnnnnnnnnnnnnnnnnnnnnnnnnnnnnnnnnnnnnnnnnnnnnnnnnnnnnnnnnnnnnnnnnnnnnnnnnnnnnnnnnnnnnnnnnnnnnnnnnnnnnnnnnnnnnnnnnnnnnnnnnnnnnnnnnnnnnnnnnnnnnnnnnnnnnnnnnnnnnnnnnnnnnnnnnnnnnnnnnnnnnnnnnnnnnnnnnnnnnnnnnnnnnnnnnnnnnnnnnnnnnnnnnnnnnnnnnnnnnnnnnnnnnnnnnnnnnnnnnnnnnnnnnnnnnnnnnnnnnnnnnnnnnnnnnnnnnnnnnnnnnnnnnnnnnnnnnnnnnnnnnnnnnnnnnnnnnnnnnnnnnnnnnnnnnnnnnnnnnnnnnnnnnnnnnnnnnnnnnnnnnnnnnnnnnnnnnnnnnnnnnnnnnnnnnnnnnnnnnnnnnnnnnnnnnnnnnnnnnnnnnnnnnnnnnnnnnnnnnnnnnnnnnnnnnnnnnnnnnnnnnnnnnnnnnnnnnnnnnnnnnnnnnnnnnnnnnnnnnnnnnnnnnnnnnnnnnnnnnnnnnnnnnnnnnnnnnnnnnnnnnnnnnnnnnnnnnnnnnnnnnnnnnnnnnnnnnnnnnnnnnnnnnnnnnnnnnnnnnnnnnnnnnnnnnnnnnnnnnnnnnnnnnnnnnnnnnnnnnnnnnnnnnnnnnnnnnnnnnnnnnnnnnnnnnnnnnnnnnnnnnnnnnnnnnnnnnnnnnnnnnnnnnnnnnnnnnnnnnnnnnnnnnnnnnnnnnnnnnnnnnnnnnnnnnnnnnnnnnnnnnnnnnnnnnnnnnnnnnnnnnnnnnnnnnnnnnnnnnnnnnnnnnnnnnnnnnnnnnnnnnnnnnnnnnnnnnnnnnnnnnnnnnnnnnnnnnnnnnnnnnnnnnnnnnnnnnnnnnnnnnnnnnnnnnnnnnnnnnnnnnnnnnnnnnnnnnnnnnnnnnnnnnnnnnnnnnnnnnnnnnnnnnnnnnnnnnnnnnnnnnnnnnnnnnnnnnnnnnnnnnnnnnnnnnnnnnnnnnnnnnnnnnnnnnnnnnnnnnnnnnnnnnnnnnnnnnnnnnnnnnnnnnnnnnnnnnnnnnnnnnnnnnnnnnnnnnnnnnnnnnnnnnnnnnnnnnnnnnnnnnnnnnnnnnnnnnnnnnnnnnnnnnnnnnnnnnnnnnnnnnnnnnnnnnnnnnnnnnnnnnnnnnnnnnnnnnnnnnnnnnnnnnnnnnnnnnnnnnnnnnnnnnnnnnnnnnnnnnnnnnnnnnnnnnnnnnnnnnnnnnnnnnnnnnnnnnnnnnnnnnnnnnnnnnnnnnnnnnnnnnnnnnnnnnnnnnnnnnnnnnnnnnnnnnnnnnnnnnnnnnnnnnnnnnnnnnnnnnnnnnnnnnnnnnnnnnnnnnnnnnnnnnnnnnnnnnnnnnnnnnnnnnnnnnnnnnnnnnnnnnnnnnnnnnnnnnnnnnnnnnnnnnnnnnnnnnnnnnnnnnnnnnnnnnnnnnnnnnnnnnnnnnnnnnnnnnnnnnnnnnnnnnnnnnnnnnnnnnnnnnnnnnnnnnnnnnnnnnnnnnnnnnnnnnnnnnnnnnnnnnnnnnnnnnnnnnnnnnnnnnnnnnnnnnnnnnnnnnnnnnnnnnnnnnnnnnnnnnnnnnnnnnnnnnnnnnnnnnnnnnnnnnnnnnnnnnnnnnnnnnnnnnnnnnnnnnnnnnnnnnnnnnnnnnnnnnnnnnnnnnnnnnnnnnnnnnnnnnnnnnnnnnnnnnnnnnnnnnnnnnnnnnnnnnnnnnnnnnnnnnnnnnnnnnnnnnnnnnnnnnnnnnnnnnnnnnnnnnnnnnnnnnnnnnnnnnnnnnnnnnnnnnnnnnnnnnnnnnnnnnnnnnnnnnnnnnnnnnnnnnnnnnnnnnnnnnnnnnnnnnnnnnnnnnnnnnnnnnnnnnnnnnnnnnnnnnnnnnnnnnnnnnnnnnnnnnnnnnnnnnnnnnnnnnnnnnnnnnnnnnnnnnnnnnnnnnnnnnnnnnnnnnnnnnnnnnnnnnnnnnnnnnnnnnnnnnnnnnnnnnnnnnnnnnnnnnnnnnnnnnnnnnnnnnnnnnnnnnnnnnnnnnnnnnnnnnnnnnnnnnnnnnnnnnnnnnnnnnnnnnnnnnnnnnnnnnnnnnnnnnnnnnnnnnnnnnnnnnnnnnnnnnnnnnnnnnnnnnnnnnnnnnnnnnnnnnnnnnnnnnnnnnnnnnnnnnnnnnnnnnnnnnnnnnnnnnnnnnnnnnnnnnnnnnnnnnnnnnnnnnnnnnnnnnnnnnnnnnnnnnnnnnnnnnnnnnnnnnnnnnnnnnnnnnnnnnnnnnnnnnnnnnnnnnnnnnnnnnnnnnnnnnnnnnnnnnnnnnnnnnnnnnnnnnnnnnnnnnnnnnnnnnnnnnnnnnnnnnnnnnnnnnnnnnnnnnnnnnnnnnnnnnnnnnnnnnnnnnnnnnnnnnnnnnnnnnnnnnnnnnnnnnnnnnnnnnnnnnnnnnnnnnnnnnnnnnnnnnnnnnnnnnnnnnnnnnnnnnnnnnnnnnnnnnnnnnnnnnnnnnnnnnnnnnnnnnnnnnnnnnnnnnnnnnnnnnnnnnnnnnnnnnnnnnnnnnnnnnnnnnnnnnnnnnnnnnnnnnnnnnnnnnnnnnnnnnnnnnnnnnnnnnnnnnnnnnnnnnnnnnnnnnnnnnnnnnnnnnnnnnnnnnnnnnnnnnnnnnnnnnnnnnnnnnnnnnnnnnnnnnnnnnnnnnnnnnnnnnnnnnnnnnnnnnnnnnnnnnnnnnnnnnnnnnnnnnnnnnnnnnnnnnnnnnnnnnnnnnnnnnnnnnnnnnnnnnnnnnnnnnnnnnnnnnnnnnnnnnnnnnnnnnnnnnnnnnnnnnnnnnnnnnnnnnnnnnnnnnnnnnnnnnnnnnnnnnnnnnnnnnnnnnnnnnnnnnnnnnnnnnnnnnnnnnnnnnnnnnnnnnnnnnnnnnnnnnnnnnnnnnnnnnnnnnnnnnnnnnnnnnnnnnnnnnnnnnnnnnnnnnnnnnnnnnnnnnnnnnnnnnnnnnnnnnnnnnnnnnnnnnnnnnnnnnnnnnnnnnnnnnnnnnnnnnnnnnnnnnnnnnnnnnnnnnnnnnnnnnnnnnnnnnnnnnnnnnnnnnnnnnnnnnnnnnnnnnnnnnnnnnnnnnnnnnnnnnnnnnnnnnnnnnnnnnnnnnnnnnnnnnnnnnnnnnnnnnnnnnnnnnnnnnnnnnnnnnnnnnnnnnnnnnnnnnnnnnnnnnnnnnnnnnnnnnnnnnnnnnnnnnnnnnnnnnnnnnnnnnnnnnnnnnnnnnnnnnnnnnnnnnnnnnnnnnnnnnnnnnnnnnnnnnnnnnnnnnnnnnnnnnnnnnnnnnnnnnnnnnnnnnnnnnnnnnnnnnnnnnnnnnnnnnnnnnnnnnnnnnnnnnnnnnnnnnnnnnnnnnnnnnnnnnnnnnnnnnnnnnnnnnnnnnnnnnnnnnnnnnnnnnnnnnnnnnnnnnnnnnnnnnnnnnnnnnnnnnnnnnnnnnnnnnnnnnnnnnnnnnnnnnnnnnnnnnnnnnnnnnnnnnnnnnnnnnnnnnnnnnnnnnnnnnnnnnnnnnnnnnnnnnnnnnnnnnnnnnnnnnnnnnnnnnnnnnnnnnnnnnnnnnnnnnnnnnnnnnnnnnnnnnnnnnnnnnnnnnnnnnnnnnnnnnnnnnnnnnnnnnnnnnnnnnnnnnnnnnnnnnnnnnnnnnnnnnnnnnnnnnnnnnnnnnnnnnnnnnnnnnnnnnnnnnnnnnnnnnnnnnnnnnnnnnnnnnnnnnnnnnnnnnnnnnnnnnnnnnnnnnnnnnnnnnnnnnnnnnnnnnnnnnnnnnnnnnnnnnnnnnnnnnnnnnnnnnnnnnnnnnnnnnnnnnnnnnnnnnnnnnnnnnnnnnnnnnnnnnnnnnnnnnnnnnnnnnnnnnnnnnnnnnnnnnnnnnnnnnnnnnnnnnnnnnnnnnnnnnnnnnnnnnnnnnnnnnnnnnnnnnnnnnnnnnnnnnnnnnnnnnnnnnnnnnnnnnnnnnnnnnnnnnnnnnnnnnnnnnnnnnnnnnnnnnnnnnnnnnnnnnnnnnnnnnnnnnnnnnnnnnnnnnnnnnnnnnnnnnnnnnnnnnnnnnnnnnnnnnnnnnnnnnnnnnnnnnnnnnnnnnnnnnnnnnnnnnnnnnnnnnnnnnnnnnnnnnnnnnnnnnnnnnnnnnnnnnnnnnnnnnnnnnnnnnnnnnnnnnnnnnnnnnnnnnnnnnnnnnnnnnnnnnnnnnnnnnnnnnnnnnnnnnnnnnnnnnnnnnnnnnnnnnnnnnnnnnnnnnnnnnnnnnnnnnnnnnnnnnnnnnnnnnnnnnnnnnnnnnnnnnnnnnnnnnnnnnnnnnnnnnnnnnnnnnnnnnnnnnnnnnnnnnnnnnnnnnnnnnnnnnnnnnnnnnnnnnnnnnnnnnnnnnnnnnnnnnnnnnnnnnnnnnnnnnnnnnnnnnnnnnnnnnnnnnnnnnnnnnnnnnnnnnnnnnnnnnnnnnnnnnnnnnnnnnnnnnnnnnnnnnnnnnnnnnnnnnnnnnnnnnnnnnnnnnnnnnnnnnnnnnnnnnnnnnnnnnnnnnnnnnnnnnnnnnnnnnnnnnnnnnnnnnnnnnnnnnnnnnnnnnnnnnnnnnnnnnnnnnnnnnnnnnnnnnnnnnnnnnnnnnnnnnnnnnnnnnnnnnnnnnnnnnnnnnnnnnnnnnnnnnnnnnnnnnnnnnnnnnnnnnnnnnnnnnnnnnnnnnnnnnnnnnnnnnnnnnnnnnnnnnnnnnnnnnnnnnnnnnnnnnnnnnnnnnnnnnnnnnnnnnnnnnnnnnnnnnnnnnnnnnnnnnnnnnnnnnnnnnnnnnnnnnnnnnnnnnnnnnnnnnnnnnnnnnnnnnnnnnnnnnnnnnnnnnnnnnnnnnnnnnnnnnnnnnnnnnnnnnnnnnnnnnnnnnnnnnnnnnnnnnnnnnnnnnnnnnnnnnnnnnnnnnnnnnnnnnnnnnnnnnnnnnnnnnnnnnnnnnnnnnnnnnnnnnnnnnnnnnnnnnnnnnnnnnnnnnnnnnnnnnnnnnnnnnnnnnnnnnnnnnnnnnnnnnnnnnnnnnnnnnnnnnnnnnnnnnnnnnnnnnnnnnnnnnnnnnnnnnnnnnnnnnnnnnnnnnnnnnnnnnnnnnnnnnnnnnnnnnnnnnnnnnnnnnnnnnnnnnnnnnnnnnnnnnnnnnnnnnnnnnnnnnnnnnnnnnnnnnnnnnnnnnnnnnnnnnnnnnnnnnnnnnnnnnnnnnnnnnnnnnnnnnnnnnnnnnnnnnnnnnnnnnnnnnnnnnnnnnnnnnnnnnnnnnnnnnnnnnnnnnnnnnnnnnnnnnnnnnnnnnnnnnnnnnnnnnnnnnnnnnnnnnnnnnnnnnnnnnnnnnnnnnnnnnnnnnnnnnnnnnnnnnnnnnnnnnnnnnnnnnnnnnnnnnnnnnnnnnnnnnnnnnnnnnnnnnnnnnnnnnnnnnnnnnnnnnnnnnnnnnnnnnnnnnnnnnnnnnnnnnnnnnnnnnnnnnnnnnnnnnnnnnnnnnnnnnnnnnnnnnnnnnnnnnnnnnnnnnnnnnnnnnnnnnnnnnnnnnnnnnnnnnnnnnnnnnnnnnnnnnnnnnnnnnnnnnnnnnnnnnnnnnnnnnnnnnnnnnnnnnnnnnnnnnnnnnnnnnnnnnnnnnnnnnnnnnnnnnnnnnnnnnnnnnnnnnnnnnnnnnnnnnnnnnnnnnnnnnnnnnnnnnnnnnnnnnnnnnnnnnnnnnnnnnnnnnnnnnnnnnnnnnnnnnnnnnnnnnnnnnnnnnnnnnnnnnnnnnnnnnnnnnnnnnnnnnnnnnnnnnnnnnnnnnnnnnnnnnnnnnnnnnnnnnnnnnnnnnnnnnnnnnnnnnnnnnnnnnnnnnnnnnnnnnnnnnnnnnnnnnnnnnnnnnnnnnnnnnnnnnnnnnnnnnnnnnnnnnnnnnnnnnnnnnnnnnnnnnnnnnnnnnnnnnnnnnnnnnnnnnnnnnnnnnnnnnnnnnnnnnnnnnnnnnnnnnnnnnnnnnnnnnnnnnnnnnnnnnnnnnnnnnnnnnnnnnnnnnnnnnnnnnnnnnnnnnnnnnnnnnnnnnnnnnnnnnnnnnnnnnnnnnnnnnnnnnnnnnnnnnnnnnnnnnnnnnnnnnnnnnnnnnnnnnnnnnnnnnnnnnnnnnnnnnnnnnnnnnnnnnnnnnnnnnnnnnnnnnnnnnnnnnnnnnnnnnnnnnnnnnnnnnnnnnnnnnnnnnnnnnnnnnnnnnnnnnnnnnnnnnnnnnnnnnnnnnnnnnnnnnnnnnnnnnnnnnnnnnnnnnnnnnnnnnnnnnnnnnnnnnnnnnnnnnnnnnnnnnnnnnnnnnnnnnnnnnnnnnnnnnnnnnnnnnnnnnnnnnnnnnnnnnnnnnnnnnnnnnnnnnnnnnnnnnnnnnnnnnnnnnnnnnnnnnnnnnnnnnnnnnnnnnnnnnnnnnnnnnnnnnnnnnnnnnnnnnnnnnnnnnnnnnnnnnnnnnnnnnnnnnnnnnnnnnnnnnnnnnnnnnnnnnnnnnnnnnnnnnnnnnnnnnnnnnnnnnnnnnnnnnnnnnnnnnnnnnnnnnnnnnnnnnnnnnnnnnnnnnnnnnnnnnnnnnnnnnnnnnnnnnnnnnnnnnnnnnnnnnnnnnnnnnnnnnnnnnnnnnnnnnnnnnnnnnnnnnnnnnnnnnnnnnnnnnnnnnnnnnnnnnnnnnnnnnnnnnnnnnnnnnnnnnnnnnnnnnnnnnnnnnnnnnnnnnnnnnnnnnnnnnnnnnnnnnnnnnnnnnnnnnnnnnnnnnnnnnnnnnnnnnnnnnnnnnnnnnnnnnnnnnnnnnnnnnnnnnnnnnnnnnnnnnnnnnnnnnnnnnnnnnnnnnnnnnnnnnnnnnnnnnnnnnnnnnnnnnnnnnnnnnnnnnnnnnnnnnnnnnnnnnnnnnnnnnnnnnnnnnnnnnnnnnnnnnnnnnnnnnnnnnnnnnnnnnnnnnnnnnnnnnnnnnnnnnnnnnnnnnnnnnnnnnnnnnnnnnnnnnnnnnnnnnnnnnnnnnnnnnnnnnnnnnnnnnnnnnnnnnnnnnnnnnnnnnnnnnnnnnnnnnnnnnnnnnnnnnnnnnnnnnnnnnnnnnnnnnnnnnnnnnnnnnnnnnnnnnnnnnnnnnnnnnnnnnnnnnnnnnnnnnnnnnnnnnnnnnnnnnnnnnnnnnnnnnnnnnnnnnnnnnnnnnnnnnnnnnnnnnnnnnnnnnnnnnnnnnnnnnnnnnnnnnnnnnnnnnnnnnnnnnnnnnnnnnnnnnnnnnnnnnnnnnnnnnnnnnnnnnnnnnnnnnnnnnnnnnnnnnnnnnnnnnnnnnnnnnnnnnnnnnnnnnnnnnnnnnnnnnnnnnnnnnnnnnnnnnnnnnnnnnnnnnnnnnnnnnnnnnnnnnnnnnnnnnnnnnnnnnnnnnnnnnnnnnnnnnnnnnnnnnnnnnnnnnnnnnnnnnnnnnnnnnnnnnnnnnnnnnnnnnnnnnnnnnnnnnnnnnnnnnnnnnnnnnnnnnnnnnnnnnnnnnnnnnnnnnnnnnnnnnnnnnnnnnnnnnnnnnnnnnnnnnnnnnnnnnnnnnnnnnnnnnnnnnnnnnnnnnnnnnnnnnnnnnnnnnnnnnnnnnnnnnnnnnnnnnnnnnnnnnnnnnnnnnnnnnnnnnnnnnnnnnnnnnnnnnnnnnnnnnnnnnnnnnnnnnnnnnnnnnnnnnnnnnnnnnnnnnnnnnnnnnnnnnnnnnnnnnnnnnnnnnnnnnnnnnnnnnnnnnnnnnnnnnnnnnnnnnnnnnnnnnnnnnnnnnnnnnnnnnnnnnnnnnnnnnnnnnnnnnnnnnnnnnnnnnnnnnnnnnnnnnnnnnnnnnnnnnnnnnnnnnnnnnnnnnnnnnnnnnnnnnnnnnnnnnnnnnnnnnnnnnnnnnnnnnnnnnnnnnnnnnnnnnnnnnnnnnnnnnnnnnnnnnnnnnnnnnnnnnnnnnnnnnnnnnnnnnnnnnnnnnnnnnnnnnnnnnnnnnnnnnnnnnnnnnnnnnnnnnnnnnnnnnnnnnnnnnnnnnnnnnnnnnnnnnnnnnnnnnnnnnnnnnnnnnnnnnnnnnnnnnnnnnnnnnnnnnnnnnnnnnnnnnnnnnnnnnnnnnnnnnnnnnnnnnnnnnnnnnnnnnnnnnnnnnnnnnnnnnnnnnnnnnnnnnnnnnnnnnnnnnnnnnnnnnnnnnnnnnnnnnnnnnnnnnnnnnnnnnnnnnnnnnnnnnnnnnnnnnnnnnnnnnnnnnnnnnnnnnnnnnnnnnnnnnnnnnnnnnnnnnnnnnnnnnnnnnnnnnnnnnnnnnnnnnnnnnnnnnnnnnnnnnnnnnnnnnnnnnnnnnnnnnnnnnnnnnnnnnnnnnnnnnnnnnnnnnnnnnnnnnnnnnnnnnnnnnnnnnnnnnnnnnnnnnnnnnnnnnnnnnnnnnnnnnnnnnnnnnnnnnnnnnnnnnnnnnnnnnnnnnnnnnnnnnnnnnnnnnnnnnnnnnnnnnnnnnnnnnnnnnnnnnnnnnnnnnnnnnnnnnnnnnnnnnnnnnnnnnnnnnnnnnnnnnnnnnnnnnnnnnnnnnnnnnnnnnnnnnnnnnnnnnnnnnnnnnnnnnnnnnnnnnnnnnnnnnnnnnnnnnnnnnnnnnnnnnnnnnnnnnnnnnnnnnnnnnnnnnnnnnnnnnnnnnnnnnnnnnnnnnnnnnnnnnnnnnnnnnnnnnnnnnnnnnnnnnnnnnnnnnnnnnnnnnnnnnnnnnnnnnnnnnnnnnnnnnnnnnnnnnnnnnnnnnnnnnnnnnnnnnnnnnnnnnnnnnnnnnnnnnnnnnnnnnnnnnnnnnnnnnnnnnnnnnnnnnnnnnnnnnnnnnnnnnnnnnnnnnnnnnnnnnnnnnnnnnnnnnnnnnnnnnnnnnnnnnnnnnnnnnnnnnnnnnnnnnnnnnnnnnnnnnnnnnnnnnnnnnnnnnnnnnnnnnnnnnnnnnnnnnnnnnnnnnnnnnnnnnnnnnnnnnnnnnnnnnnnnnnnnnnnnnnnnnnnnnnnnnnnnnnnnnnnnnnnnnnnnnnnnnnnnnnnnnnnnnnnnnnnnnnnnnnnnnnnnnnnnnnnnnnnnnnnnnnnnnnnnnnnnnnnnnnnnnnnnnnnnnnnnnnnnnnnnnnnnnnnnnnnnnnnnnnnnnnnnnnnnnnnnnnnnnnnnnnnnnnnnnnnnnnnnnnnnnnnnnnnnnnnnnnnnnnnnnnnnnnnnnnnnnnnnnnnnnnnnnnnnnnnnnnnnnnnnnnnnnnnnnnnnnnnnnnnnnnnnnnnnnnnnnnnnnnnnnnnnnnnnnnnnnnnnnnnnnnnnnnnnnnnnnnnnnnnnnnnnnnnnnnnnnnnnnnnnnnnnnnnnnnnnnnnnnnnnnnnnnnnnnnnnnnnnnnnnnnnnnnnnnnnnnnnnnnnnnnnnnnnnnnnnnnnnnnnnnnnnnnnnnnnnnnnnnnnnnnnnnnnnnnnnnnnnnnnnnnnnnnnnnnnnnnnnnnnnnnnnnnnnnnnnnnnnnnnnnnnnnnnnnnnnnnnnnnnnnnnnnnnnnnnnnnnnnnnnnnnnnnnnnnnnnnnnnnnnnnnnnnnnnnnnnnnnnnnnnnnnnnnnnnnnnnnnnnnnnnnnnnnnnnnnnnnnnnnnnnnnnnnnnnnnnnnnnnnnnnnnnnnnnnnnnnnnnnnnnnnnnnnnnnnnnnnnnnnnnnnnnnnnnnnnnnnnnnnnnnnnnnnnnnnnnnnnnnnnnnnnnnnnnnnnnnnnnnnnnnnnnnnnnnnnnnnnnnnnnnnnnnnnnnnnnnnnnnnnnnnnnnnnnnnnnnnnnnnnnnnnnnnnnnnnnnnnnnnnnnnnnnnnnnnnnnnnnnnnnnnnnnnnnnnnnnnnnnnnnnnnnnnnnnnnnnnnnnnnnnnnnnnnnnnnnnnnnnnnnnnnnnnnnnnnnnnnnnnnnnnnnnnnnnnnnnnnnnnnnnnnnnnnnnnnnnnnnnnnnnnnnnnnnnnnnnnnnnnnnnnnnnnnnnnnnnnnnnnnnnnnnnnnnnnnnnnnnnnnnnnnnnnnnnnnnnnnnnnnnnnnnnnnnnnnnnnnnnnnnnnnnnnnnnnnnnnnnnnnnnnnnnnnnnnnnnnnnnnnnnnnnnnnnnnnnnnnnnnnnnnnnnnnnnnnnnnnnnnnnnnnnnnnnnnnnnnnnnnnnnnnnnnnnnnnnnnnnnnnnnnnnnnnnnnnnnnnnnnnnnnnnnnnnnnnnnnnnnnnnnnnnnnnnnnnnnnnnnnnnnnnnnnnnnnnnnnnnnnnnnnnnnnnnnnnnnnnnnnnnnnnnnnnnnnnnnnnnnnnnnnnnnnnnnnnnnnnnnnnnnnnnnnnnnnnnnnnnnnnnnnnnnnnnnnnnnnnnnnnnnnnnnnnnnnnnnnnnnnnnnnnnnnnnnnnnnnnnnnnnnnnnnnnnnnnnnnnnnnnnnnnnnnnnnnnnnnnnnnnnnnnnnnnnnnnnnnnnnnnnnnnnnnnnnnnnnnnnnnnnnnnnnnnnnnnnnnnnnnnnnnnnnnnnnnnnnnnnnnnnnnnnnnnnnnnnnnnnnnnnnnnnnnnnnnnnnnnnnnnnnnnnnnnnnnnnnnnnnnnnnnnnnnnnnnnnnnnnnnnnnnnnnnnnnnnnnnnnnnnnnnnnnnnnnnnnnnnnnnnnnnnnnnnnnnnnnnnnnnnnnnnnnnnnnnnnnnnnnnnnnnnnnnnnnnnnnnnnnnnnnnnnnnnnnnnnnnnnnnnnnnnnnnnnnnnnnnnnnnnnnnnnnnnnnnnnnnnnnnnnnnnnnnnnnnnnnnnnnnnnnnnnnnnnnnnnnnnnnnnnnnnnnnnnnnnnnnnnnnnnnnnnnnnnnnnnnnnnnnnnnnnnnnnnnnnnnnnnnnnnnnnnnnnnnnnnnnnnnnnnnnnnnnnnnnnnnnnnnnnnnnnnnnnnnnnnnnnnnnnnnnnnnnnnnnnnnnnnnnnnnnnnnnnnnnnnnnnnnnnnnnnnnnnnnnnnnnnnnnnnnnnnnnnnnnnnnnnnnnnnnnnnnnnnnnnnnnnnnnnnnnnnnnnnnnnnnnnnnnnnnnnnnnnnnnnnnnnnnnnnnnnnnnnnnnnnnnnnnnnnnnnnnnnnnnnnnnnnnnnnnnnnnnnnnnnnnnnnnnnnnnnnnnnnnnnnnnnnnnnnnnnnnnnnnnnnnnnnnnnnnnnnnnnnnnnnnnnnnnnnnnnnnnnnnnnnnnnnnnnnnnnnnnnnnnnnnnnnnnnnnnnnnnnnnnnnnnnnnnnnnnnnnnnnnnnnnnnnnnnnnnnnnnnnnnnnnnnnnnnnnnnnnnnnnnnnnnnnnnnnnnnnnnnnnnnnnnnnnnnnnnnnnnnnnnnnnnnnnnnnnnnnnnnnnnnnnnnnnnnnnnnnnnnnnnnnnnnnnnnnnnnnnnnnnnnnnnnnnnnnnnnnnnnnnnnnnnnnnnnnnnnnnnnnnnnnnnnnnnnnnnnnnnnnnnnnnnnnnnnnnnnnnnnnnnnnnnnnnnnnnnnnnnnnnnnnnnnnnnnnnnnnnnnnnnnnnnnnnnnnnnnnnnnnnnnnnnnnnnnnnnnnnnnnnnnnnnnnnnnnnnnnnnnnnnnnnnnnnnnnnnnnnnnnnnnnnnnnnnnnnnnnnnnnnnnnnnnnnnnnnnnnnnnnnnnnnnnnnnnnnnnnnnnnnnnnnnnnnnnnnnnnnnnnnnnnnnnnnnnnnnnnnnnnnnnnnnnnnnnnnnnnnnnnnnnnnnnnnnnnnnnnnnnnnnnnnnnnnnnnnnnnnnnnnnnnnnnnnnnnnnnnnnnnnnnnnnnnnnnnnnnnnnnnnnnnnnnnnnnnnnnnnnnnnnnnnnnnnnnnnnnnnnnnnnnnnnnnnnnnnnnnnnnnnnnnnnnnnnnnnnnnnnnnnnnnnnnnnnnnnnnnnnnnnnnnnnnnnnnnnnnnnnnnnnnnnnnnnnnnnnnnnnnnnnnnnnnnnnnnnnnnnnnnnnnnnnnnnnnnnnnnnnnnnnnnnnnnnnnnnnnnnnnnnnnnnnnnnnnnnnnnnnnnnnnnnnnnnnnnnnnnnnnnnnnnnnnnnnnnnnnnnnnnnnnnnnnnnnnnnnnnnnnnnnnnnnnnnnnnnnnnnnnnnnnnnnnnnnnnnnnnnnnnnnnnnnnnnnnnnnnnnnnnnnnnnnnnnnnnnnnnnnnnnnnnnnnnnnnnnnnnnnnnnnnnnnnnnnnnnnnnnnnnnnnnnnnnnnnnnnnnnnnnnnnnnnnnnnnnnnnnnnnnnnnnnnnnnnnnnnnnnnnnnnnnnnnnnnnnnnnnnnnnnnnnnnnnnnnnnnnnnnnnnnnnnnnnnnnnnnnnnnnnnnnnnnnnnnnnnnnnnnnnnnnnnnnnnnnnnnnnnnnnnnnnnnnnnnnnnnnnnnnnnnnnnnnnnnnnnnnnnnnnnnnnnnnnnnnnnnnnnnnnnnnnnnnnnnnnnnnnnnnnnnnnnnnnnnnnnnnnnnnnnnnnnnnnnnnnnnnnnnnnnnnnnnnnnnnnnnnnnnnnnnnnnnnnnnnnnnnnnnnnnnnnnnnnnnnnnnnnnnnnnnnnnnnnnnnnnnnnnnnnnnnnnnnnnnnnnnnnnnnnnnnnnnnnnnnnnnnnnnnnnnnnnnnnnnnnnnnnnnnnnnnnnnnnnnnnnnnnnnnnnnnnnnnnnnnnnnnnnnnnnnnnnnnnnnnnnnnnnnnnnnnnnnnnnnnnnnnnnnnnnnnnnnnnnnnnnnnnnnnnnnnnnnnnnnnnnnnnnnnnnnnnnnnnnnnnnnnnnnnnnnnnnnnnnnnnnnnnnnnnnnnnnnnnnnnnnnnnnnnnnnnnnnnnnnnnnnnnnnnnnnnnnnnnnnnnnnnnnnnnnnnnnnnnnnnnnnnnnnnnnnnnnnnnnnnnnnnnnnnnnnnnnnnnnnnnnnnnnnnnnnnnnnnnnnnnnnnnnnnnnnnnnnnnnnnnnnnnnnnnnnnnnnnnnnnnnnnnnnnnnnnnnnnnnnnnnnnnnnnnnnnnnnnnnnnnnnnnnnnnnnnnnnnnnnnnnnnnnnnnnnnnnnnnnnnnnnnnnnnnnnnnnnnnnnnnnnnnnnnnnnnnnnnnnnnnnnnnnnnnnnnnnnnnnnnnnnnnnnnnnnnnnnnnnnnnnnnnnnnnnnnnnnnnnnnnnnnnnnnnnnnnnnnnnnnnnnnnnnnnnnnnnnnnnnnnnnnnnnnnnnnnnnnnnnnnnnnnnnnnnnnnnnnnnnnnnnnnnnnnnnnnnnnnnnnnnnnnnnnnnnnnnnnnnnnnnnnnnnnnnnnnnnnnnnnnnnnnnnnnnnnnnnnnnnnnnnnnnnnnnnnnnnnnnnnnnnnnnnnnnnnnnnnnnnnnnnnnnnnnnnnnnnnnnnnnnnnnnnnnnnnnnnnnnnnnnnnnnnnnnnnnnnnnnnnnnnnnnnnnnnnnnnnnnnnnnnnnnnnnnnnnnnnnnnnnnnnnnnnnnnnnnnnnnnnnnnnnnnnnnnnnnnnnnnnnnnnnnnnnnnnnnnnnnnnnnnnnnnnnnnnnnnnnnnnnnnnnnnnnnnnnnnnnnnnnnnnnnnnnnnnnnnnnnnnnnnnnnnnnnnnnnnnnnnnnnnnnnnnnnnnnnnnnnnnnnnnnnnnnnnnnnnnnnnnnnnnnnnnnnnnnnnnnnnnnnnnnnnnnnnnnnnnnnnnnnnnnnnnnnnnnnnnnnnnnnnnnnnnnnnnnnnnnnnnnnnnnnnnnnnnnnnnnnnnnnnnnnnnnnnnnnnnnnnnnnnnnnnnnnnnnnnnnnnnnnnnnnnnnnnnnnnnnnnnnnnnnnnnnnnnnnnnnnnnnnnnnnnnnnnnnnnnnnnnnnnnnnnnnnnnnnnnnnnnnnnnnnnnnnnnnnnnnnnnnnnnnnnnnnnnnnnnnnnnnnnnnnnnnnnnnnnnnnnnnnnnnnnnnnnnnnnnnnnnnnnnnnnnnnnnnnnnnnnnnnnnnnnnnnnnnnnnnnnnnnnnnnnnnnnnnnnnnnnnnnnnnnnnnnnnnnnnnnnnnnnnnnnnnnnnnnnnnnnnnnnnnnnnnnnnnnnnnnnnnnnnnnnnnnnnnnnnnnnnnnnnnnnnnnnnnnnnnnnnnnnnnnnnnnnnnnnnnnnnnnnnnnnnnnnnnnnnnnnnnnnnnnnnnnnnnnnnnnnnnnnnnnnnnnnnnnnnnnnnnnnnnnnnnnnnnnnnnnnnnnnnnnnnnnnnnnnnnnnnnnnnnnnnnnnnnnnnnnnnnnnnnnnnnnnnnnnnnnnnnnnnnnnnnnnnnnnnnnnnnnnnnnnnnnnnnnnnnnnnnnnnnnnnnnnnnnnnnnnnnnnnnnnnnnnnnnnnnnnnnnnnnnnnnnnnnnnnnnnnnnnnnnnnnnnnnnnnnnnnnnnnnnnnnnnnnnnnnnnnnnnnnnnnnnnnnnnnnnnnnnnnnnnnnnnnnnnnnnnnnnnnnnnnnnnnnnnnnnnnnnnnnnnnnnnnnnnnnnnnnnnnnnnnnnnnnnnnnnnnnnnnnnnnnnnnnnnnnnnnnnnnnnnnnnnnnnnnnnnnnnnnnnnnnnnnnnnnnnnnnnnnnnnnnnnnnnnnnnnnnnnnnnnnnnnnnnnnnnnnnnnnnnnnnnnnnnnnnnnnnnnnnnnnnnnnnnnnnnnnnnnnnnnnnnnnnnnnnnnnnnnnnnnnnnnnnnnnnnnnnnnnnnnnnnnnnnnnnnnnnnnnnnnnnnnnnnnnnnnnnnnnnnnnnnnnnnnnnnnnnnnnnnnnnnnnnnnnnnnnnnnnnnnnnnnnnnnnnnnnnnnnnnnnnnnnnnnnnnnnnnnnnnnnnnnnnnnnnnnnnnnnnnnnnnnnnnnnnnnnnnnnnnnnnnnnnnnnnnnnnnnnnnnnnnnnnnnnnnnnnnnnnnnnnnnnnnnnnnnnnnnnnnnnnnnnnnnnnnnnnnnnnnnnnnnnnnnnnnnnnnnnnnnnnnnnnnnnnnnnnnnnnnnnnnnnnnnnnnnnnnnnnnnnnnnnnnnnnnnnnnnnnnnnnnnnnnnnnnnnnnnnnnnnnnnnnnnnnnnnnnnnnnnnnnnnnnnnnnnnnnnnnnnnnnnnnnnnnnnnnnnnnnnnnnnnnnnnnnnnnnnnnnnnnnnnnnnnnnnnnnnnnnnnnnnnnnnnnnnnnnnnnnnnnnnnnnnnnnnnnnnnnnnnnnnnnnnnnnnnnnnnnnnnnnnnnnnnnnnnnnnnnnnnnnnnnnnnnnnnnnnnnnnnnnnnnnnnnnnnnnnnnnnnnnnnnnnnnnnnnnnnnnnnnnnnnnnnnnnnnnnnnnnnnnnnnnnnnnnnnnnnnnnnnnnnnnnnnnnnnnnnnnnnnnnnnnnnnnnnnnnnnnnnnnnnnnnnnnnnnnnnnnnnnnnnnnnnnnnnnnnnnnnnnnnnnnnnnnnnnnnnnnnnnnnnnnnnnnnnnnnnnnnnnnnnnnnnnnnnnnnnnnnnnnnnnnnnnnnnnnnnnnnnnnnnnnnnnnnnnnnnnnnnnnnnnnnnnnnnnnnnnnnnnnnnnnnnnnnnnnnnnnnnnnnnnnnnnnnnnnnnnnnnnnnnnnnnnnnnnnnnnnnnnnnnnnnnnnnnnnnnnnnnnnnnnnnnnnnnnnnnnnnnnnnnnnnnnnnnnnnnnnnnnnnnnnnnnnnnnnnnnnnnnnnnnnnnnnnnnnnnnnnnnnnnnnnnnnnnnnnnnnnnnnnnnnnnnnnnnnnnnnnnnnnnnnnnnnnnnnnnnnnnnnnnnnnnnnnnnnnnnnnnnnnnnnnnnnnnnnnnnnnnnnnnnnnnnnnnnnnnnnnnnnnnnnnnnnnnnnnnnnnnnnnnnnnnnnnnnnnnnnnnnnnnnnnnnnnnnnnnnnnnnnnnnnnnnnnnnnnnnnnnnnnnnnnnnnnnnnnnnnnnnnnnnnnnnnnnnnnnnnnnnnnnnnnnnnnnnnnnnnnnnnnnnnnnnnnnnnnnnnnnnnnnnnnnnnnnnnnnnnnnnnnnnnnnnnnnnnnnnnnnnnnnnnnnnnnnnnnnnnnnnnnnnnnnnnnnnnnnnnnnnnnnnnnnnnnnnnnnnnnnnnnnnnnnnnnnnnnnnnnnnnnnnnnnnnnnnnnnnnnnnnnnnnnnnnnnnnnnnnnnnnnnnnnnnnnnnnnnnnnnnnnnnnnnnnnnnnnnnnnnnnnnnnnnnnnnnnnnnnnnnnnnnnnnnnnnnnnnnnnnnnnnnnnnnnnnnnnnnnnnnnnnnnnnnnnnnnnnnnnnnnnnnnnnnnnnnnnnnnnnnnnnnnnnnnnnnnnnnnnnnnnnnnnnnnnnnnnnnnnnnnnnnnnnnnnnnnnnnnnnnnnnnnnnnnnnnnnnnnnnnnnnnnnnnnnnnnnnnnnnnnnnnnnnnnnnnnnnnnnnnnnnnnnnnnnnnnnnnnnnnnnnnnnnnnnnnnnnnnnnnnnnnnnnnnnnnnnnnnnnnnnnnnnnnnnnnnnnnnnnnnnnnnnnnnnnnnnnnnnnnnnnnnnnnnnnnnnnnnnnnnnnnnnnnnnnnnnnnnnnnnnnnnnnnnnnnnnnnnnnnnnnnnnnnnnnnnnnnnnnnnnnnnnnnnnnnnnnnnnnnnnnnnnnnnnnnnnnnnnnnnnnnnnnnnnnnnnnnnnnnnnnnnnnnnnnnnnnnnnnnnnnnnnnnnnnnnnnnnnnnnnnnnnnnnnnnnnnnnnnnnnnnnnnnnnnnnnnnnnnnnnnnnnnnnnnnnnnnnnnnnnnnnnnnnnnnnnnnnnnnnnnnnnnnnnnnnnnnnnnnnnnnnnnnnnnnnnnnnnnnnnnnnnnnnnnnnnnnnnnnnnnnnnnnnnnnnnnnnnnnnnnnnnnnnnnnnnnnnnnnnnnnnnnnnnnnnnnnnnnnnnnnnnnnnnnnnnnnnnnnnnnnnnnnnnnnnnnnnnnnnnnnnnnnnnnnnnnnnnnnnnnnnnnnnnnnnnnnnnnnnnnnnnnnnnnnnnnnnnnnnnnnnnnnnnnnnnnnnnnnnnnnnnnnnnnnnnnnnnnnnnnnnnnnnnnnnnnnnnnnnnnnnnnnnnnnnnnnnnnnnnnnnnnnnnnnnnnnnnnnnnnnnnnnnnnnnnnnnnnnnnnnnnnnnnnnnnnnnnnnnnnnnnnnnnnnnnnnnnnnnnnnnnnnnnnnnnnnnnnnnnnnnnnnnnnnnnnnnnnnnnnnnnnnnnnnnnnnnnnnnnnnnnnnnnnnnnnnnnnnnnnnnnnnnnnnnnnnnnnnnnnnnnnnnnnnnnnnnnnnnnnnnnnnnnnnnnnnnnnnnnnnnnnnnnnnnnnnnnnnnnnnnnnnnnnnnnnnnnnnnnnnnnnnnnnnnnnnnnnnnnnnnnnnnnnnnnnnnnnnnnnnnnnnnnnnnnnnnnnnnnnnnnnnnnnnnnnnnnnnnnnnnnnnnnnnnnnnnnnnnnnnnnnnnnnnnnnnnnnnnnnnnnnnnnnnnnnnnnnnnnnnnnnnnnnnnnnnnnnnnnnnnnnnnnnnnnnnnnnnnnnnnnnnnnnnnnnnnnnnnnnnnnnnnnnnnnnnnnnnnnnnnnnnnnnnnnnnnnnnnnnnnnnnnnnnnnnnnnnnnnnnnnnnnnnnnnnnnnnnnnnnnnnnnnnnnnnnnnnnnnnnnnnnnnnnnnnnnnnnnnnnnnnnnnnnnnnnnnnnnnnnnnnnnnnnnnnnnnnnnnnnnnnnnnnnnnnnnnnnnnnnnnnnnnnnnnnnnnnnnnnnnnnnnnnnnnnnnnnnnnnnnnnnnnnnnnnnnnnnnnnnnnnnnnnnnnnnnnnnnnnnnnnnnnnnnnnnnnnnnnnnnnnnnnnnnnnnnnnnnnnnnnnnnnnnnnnnnnnnnnnnnnnnnnnnnnnnnnnnnnnnnnnnnnnnnnnnnnnnnnnnnnnnnnnnnnnnnnnnnnnnnnnnnnnnnnnnnnnnnnnnnnnnnnnnnnnnnnnnnnnnnnnnnnnnnnnnnnnnnnnnnnnnnnnnnnnnnnnnnnnnnnnnnnnnnnnnnnnnnnnnnnnnnnnnnnnnnnnnnnnnnnnnnnnnnnnnnnnnnnnnnnnnnnnnnnnnnnnnnnnnnnnnnnnnnnnnnnnnnnnnnnnnnnnnnnnnnnnnnnnnnnnnnnnnnnnnnnnnnnnnnnnnnnnnnnnnnnnnnnnnnnnnnnnnnnnnnnnnnnnnnnnnnnnnnnnnnnnnnnnnnnnnnnnnnnnnnnnnnnnnnnnnnnnnnnnnnnnnnnnnnnnnnnnnnnnnnnnnnnnnnnnnnnnnnnnnnnnnnnnnnnnnnnnnnnnnnnnnnnnnnnnnnnnnnnnnnnnnnnnnnnnnnnnnnnnnnnnnnnnnnnnnnnnnnnnnnnnnnnnnnnnnnnnnnnnnnnnnnnnnnnnnnnnnnnnnnnnnnnnnnnnnnnnnnnnnnnnnnnnnnnnnnnnnnnnnnnnnnnnnnnnnnnnnnnnnnnnnnnnnnnnnnnnnnnnnnnnnnnnnnnnnnnnnnnnnnnnnnnnnnnnnnnnnnnnnnnnnnnnnnnnnnnnnnnnnnnnnnnnnnnnnnnnnnnnnnnnnnnnnnnnnnnnnnnnnnnnnnnnnnnnnnnnnnnnnnnnnnnnnnnnnnnnnnnnnnnnnnnnnnnnnnnnnnnnnnnnnnnnnnnnnnnnnnnnnnnnnnnnnnnnnnnnnnnnnnnnnnnnnnnnnnnnnnnnnnnnnnnnnnnnnnnnnnnnnnnnnnnnnnnnnnnnnnnnnnnnnnnnnnnnnnnnnnnnnnnnnnnnnnnnnnnnnnnnnnnnnnnnnnnnnnnnnnnnnnnnnnnnnnnnnnnnnnnnnnnnnnnnnnnnnnnnnnnnnnnnnnnnnnnnnnnnnnnnnnnnnnnnnnnnnnnnnnnnnnnnnnnnnnnnnnnnnnnnnnnnnnnnnnnnnnnnnnnnnnnnnnnnnnnnnnnnnnnnnnnnnnnnnnnnnnnnnnnnnnnnnnnnnnnnnnnnnnnnnnnnnnnnnnnnnnnnnnnnnnnnnnnnnnnnnnnnnnnnnnnnnnnnnnnnnnnnnnnnnnnnnnnnnnnnnnnnnnnnnnnnnnnnnnnnnnnnnnnnnnnnnnnnnnnnnnnnnnnnnnnnnnnnnnnnnnnnnnnnnnnnnnnnnnnnnnnnnnnnnnnnnnnnnnnnnnnnnnnnnnnnnnnnnnnnnnnnnnnnnnnnnnnnnnnnnnnnnnnnnnnnnnnnnnnnnnnnnnnnnnnnnnnnnnnnnnnnnnnnnnnnnnnnnnnnnnnnnnnnnnnnnnnnnnnnnnnnnnnnnnnnnnnnnnnnnnnnnnnnnnnnnnnnnnnnnnnnnnnnnnnnnnnnnnnnnnnnnnnnnnnnnnnnnnnnnnnnnnnnnnnnnnnnnnnnnnnnnnnnnnnnnnnnnnnnnnnnnnnnnnnnnnnnnnnnnnnnnnnnnnnnnnnnnnnnnnnnnnnnnnnnnnnnnnnnnnnnnnnnnnnnnnnnnnnnnnnnnnnnnnnnnnnnnnnnnnnnnnnnnnnnnnnnnnnnnnnnnnnnnnnnnnnnnnnnnnnnnnnnnnnnnnnnnnnnnnnnnnnnnnnnnnnnnnnnnnnnnnnnnnnnnnnnnnnnnnnnnnnnnnnnnnnnnnnnnnnnnnnnnnnnnnnnnnnnnnnnnnnnnnnnnnnnnnnnnnnnnnnnnnnnnnnnnnnnnnnnnnnnnnnnnnnnnnnnnnnnnnnnnnnnnnnnnnnnnnnnnnnnnnnnnnnnnnnnnnnnnnnnnnnnnnnnnnnnnnnnnnnnnnnnnnnnnnnnnnnnnnnnnnnnnnnnnnnnnnnnnnnnnnnnnnnnnnnnnnnnnnnnnnnnnnnnnnnnnnnnnnnnnnnnnnnnnnnnnnnnnnnnnnnnnnnnnnnnnnnnnnnnnnnnnnnnnnnnnnnnnnnnnnnnnnnnnnnnnnnnnnnnnnnnnnnnnnnnnnnnnnnnnnnnnnnnnnnnnnnnnnnnnnnnnnnnnnnnnnnnnnnnnnnnnnnnnnnnnnnnnnnnnnnnnnnnnnnnnnnnnnnnnnnnnnnnnnnnnnnnnnnnnnnnnnnnnnnnnnnnnnnnnnnnnnnnnnnnnnnnnnnnnnnnnnnnnnnnnnnnnnnnnnnnnnnnnnnnnnnnnnnnnnnnnnnnnnnnnnnnnnnnnnnnnnnnnnnnnnnnnnnnnnnnnnnnnnnnnnnnnnnnnnnnnnnnnnnnnnnnnnnnnnnnnnnnnnnnnnnnnnnnnnnnnnnnnnnnnnnnnnnnnnnnnnnnnnnnnnnnnnnnnnnnnnnnnnnnnnnnnnnnnnnnnnnnnnnnnnnnnnnnnnnnnnnnnnnnnnnnnnnnnnnnnnnnnnnnnnnnnnnnnnnnnnnnnnnnnnnnnnnnnnnnnnnnnnnnnnnnnnnnnnnnnnnnnnnnnnnnnnnnnnnnnnnnnnnnnnnnnnnnnnnnnnnnnnnnnnnnnnnnnnnnnnnnnnnnnnnnnnnnnnnnnnnnnnnnnnnnnnnnnnnnnnnnnnnnnnnnnnnnnnnnnnnnnnnnnnnnnnnnnnnnnnnnnnnnnnnnnnnnnnnnnnnnnnnnnnnnnnnnnnnnnnnnnnnnnnnnnnnnnnnnnnnnnnnnnnnnnnnnnnnnnnnnnnnnnnnnnnnnnnnnnnnnnnnnnnnnnnnnnnnnnnnnnnnnnnnnnnnnnnnnnnnnnnnnnnnnnnnnnnnnnnnnnnnnnnnnnnnnnnnnnnnnnnnnnnnnnnnnnnnnnnnnnnnnnnnnnnnnnnnnnnnnnnnnnnnnnnnnnnnnnnnnnnnnnnnnnnnnnnnnnnnnnnnnnnnnnnnnnnnnnnnnnnnnnnnnnnnnnnnnnnnnnnnnnnnnnnnnnnnnnnnnnnnnnnnnnnnnnnnnnnnnnnnnnnnnnnnnnnnnnnnnnnnnnnnnnnnnnnnnnnnnnnnnnnnnnnnnnnnnnnnnnnnnnnnnnnnnnnnnnnnnnnnnnnnnnnnnnnnnnnnnnnnnnnnnnnnnnnnnnnnnnnnnnnnnnnnnnnnnnnnnnnnnnnnnnnnnnnnnnnnnnnnnnnnnnnnnnnnnnnnnnnnnnnnnnnnnnnnnnnnnnnnnnnnnnnnnnnnnnnnnnnnnnnnnnnnnnnnnnnnnnnnnnnnnnnnnnnnnnnnnnnnnnnnnnnnnnnnnnnnnnnnnnnnnnnnnnnnnnnnnnnnnnnnnnnnnnnnnnnnnnnnnnnnnnnnnnnnnnnnnnnnnnnnnnnnnnnnnnnnnnnnnnnnnnnnnnnnnnnnnnnnnnnnnnnnnnnnnnnnnnnnnnnnnnnnnnnnnnnnnnnnnnnnnnnnnnnnnnnnnnnnnnnnnnnnnnnnnnnnnnnnnnnnnnnnnnnnnnnnnnnnnnnnnnnnnnnnnnnnnnnnnnnnnnnnnnnnnnnnnnnnnnnnnnnnnnnnnnnnnnnnnnnnnnnnnnnnnnnnnnnnnnnnnnnnnnnnnnnnnnnnnnnnnnnnnnnnnnnnnnnnnnnnnnnnnnnnnnnnnnnnnnnnnnnnnnnnnnnnnnnnnnnnnnnnnnnnnnnnnnnnnnnnnnnnnnnnnnnnnnnnnnnnnnnnnnnnnnnnnnnnnnnnnnnnnnnnnnnnnnnnnnnnnnnnnnnnnnnnnnnnnnnnnnnnnnnnnnnnnnnnnnnnnnnnnnnnnnnnnnnnnnnnnnnnnnnnnnnnnnnnnnnnnnnnnnnnnnnnnnnnnnnnnnnnnnnnnnnnnnnnnnnnnnnnnnnnnnnnnnnnnnnnnnnnnnnnnnnnnnnnnnnnnnnnnnnnnnnnnnnnnnnnnnnnnnnnnnnnnnnnnnnnnnnnnnnnnnnnnnnnnnnnnnnnnnnnnnnnnnnnnnnnnnnnnnnnnnnnnnnnnnnnnnnnnnnnnnnnnnnnnnnnnnnnnnnnnnnnnnnnnnnnnnnnnnnnnnnnnnnnnnnnnnnnnnnnnnnnnnnnnnnnnnnnnnnnnnnnnnnnnnnnnnnnnnnnnnnnnnnnnnnnnnnnnnnnnnnnnnnnnnnnnnnnnnnnnnnnnnnnnnnnnnnnnnnnnnnnnnnnnnnnnnnnnnnnnnnnnnnnnnnnnnnnnnnnnnnnnnnnnnnnnnnnnnnnnnnnnnnnnnnnnnnnnnnnnnnnnnnnnnnnnnnnnnnnnnnnnnnnnnnnnnnnnnnnnnnnnnnnnnnnnnnnnnnnnnnnnnnnnnnnnnnnnnnnnnnnnnnnnnnnnnnnnnnnnnnnnnnnnnnnnnnnnnnnnnnnnnnnnnnnnnnnnnnnnnnnnnnnnnnnnnnnnnnnnnnnnnnnnnnnnnnnnnnnnnnnnnnnnnnnnnnnnnnnnnnnnnnnnnnnnnnnnnnnnnnnnnnnnnnnnnnnnnnnnnnnnnnnnnnnnnnnnnnnnnnnnnnnnnnnnnnnnnnnnnnnnnnnnnnnnnnnnnnnnnnnnnnnnnnnnnnnnnnnnnnnnnnnnnnnnnnnnnnnnnnnnnnnnnnnnnnnnnnnnnnnnnnnnnnnnnnnnnnnnnnnnnnnnnnnnnnnnnnnnnnnnnnnnnnnnnnnnnnnnnnnnnnnnnnnnnnnnnnnnnnnnnnnnnnnnnnnnnnnnnnnnnnnnnnnnnnnnnnnnnnnnnnnnnnnnnnnnnnnnnnnnnnnnnnnnnnnnnnnnnnnnnnnnnnnnnnnnnnnnnnnnnnnnnnnnnnnnnnnnnnnnnnnnnnnnnnnnnnnnnnnnnnnnnnnnnnnnnnnnnnnnnnnnnnnnnnnnnnnnnnnnnnnnnnnnnnnnnnnnnnnnnnnnnnnnnnnnnnnnnnnnnnnnnnnnnnnnnnnnnnnnnnnnnnnnnnnnnnnnnnnnnnnnnnnnnnnnnnnnnnnnnnnnnnnnnnnnnnnnnnnnnnnnnnnnnnnnnnnnnnnnnnnnnnnnnnnnnnnnnnnnnnnnnnnnnnnnnnnnnnnnnnnnnnnnnnnnnnnnnnnnnnnnnnnnnnnnnnnnnnnnnnnnnnnnnnnnnnnnnnnnnnnnnnnnnnnnnnnnnnnnnnnnnnnnnnnnnnnnnnnnnnnnnnnnnnnnnnnnnnnnnnnnnnnnnnnnnnnnnnnnnnnnnnnnnnnnnnnnnnnnnnnnnnnnnnnnnnnnnnnnnnnnnnnnnnnnnnnnnnnnnnnnnnnnnnnnnnnnnnnnnnnnnnnnnnnnnnnnnnnnnnnnnnnnnnnnnnnnnnnnnnnnnnnnnnnnnnnnnnnnnnnnnnnnnnnnnnnnnnnnnnnnnnnnnnnnnnnnnnnnnnnnnnnnnnnnnnnnnnnnnnnnnnnnnnnnnnnnnnnnnnnnnnnnnnnnnnnnnnnnnnnnnnnnnnnnnnnnnnnnnnnnnnnnnnnnnnnnnnnnnnnnnnnnnnnnnnnnnnnnnnnnnnnnnnnnnnnnnnnnnnnnnnnnnnnnnnnnnnnnnnnnnnnnnnnnnnnnnnnnnnnnnnnnnnnnnnnnnnnnnnnnnnnnnnnnnnnnnnnnnnnnnnnnnnnnnnnnnnnnnnnnnnnnnnnnnnnnnnnnnnnnnnnnnnnnnnnnnnnnnnnnnnnnnnnnnnnnnnnnnnnnnnnnnnnnnnnnnnnnnnnnnnnnnnnnnnnnnnnnnnnnnnnnnnnnnnnnnnnnnnnnnnnnnnnnnnnnnnnnnnnnnnnnnnnnnnnnnnnnnnnnnnnnnnnnnnnnnnnnnnnnnnnnnnnnnnnnnnnnnnnnnnnnnnnnnnnnnnnnnnnnnnnnnnnnnnnnnnnnnnnnnnnnnnnnnnnnnnnnnnnnnnnnnnnnnnnnnnnnnnnnnnnnnnnnnnnnnnnnnnnnnnnnnnnnnnnnnnnnnnnnnnnnnnnnnnnnnnnnnnnnnnnnnnnnnnnnnnnnnnnnnnnnnnnnnnnnnnnnnnnnnnnnnnnnnnnnnnnnnnnnnnnnnnnnnnnnnnnnnnnnnnnnnnnnnnnnnnnnnnnnnnnnnnnnnnnnnnnnnnnnnnnnnnnnnnnnnnnnnnnnnnnnnnnnnnnnnnnnnnnnnnnnnnnnnnnnnnnnnnnnnnnnnnnnnnnnnnnnnnnnnnnnnnnnnnnnnnnnnnnnnnnnnnnnnnnnnnnnnnnnnnnnnnnnnnnnnnnnnnnnnnnnnnnnnnnnnnnnnnnnnnnnnnnnnnnnnnnnnnnnnnnnnnnnnnnnnnnnnnnnnnnnnnnnnnnnnnnnnnnnnnnnnnnnnnnnnnnnnnnnnnnnnnnnnnnnnnnnnnnnnnnnnnnnnnnnnnnnnnnnnnnnnnnnnnnnnnnnnnnnnnnnnnnnnnnnnnnnnnnnnnnnnnnnnnnnnnnnnnnnnnnnnnnnnnnnnnnnnnnnnnnnnnnnnnnnnnnnnnnnnnnnnnnnnnnnnnnnnnnnnnnnnnnnnnnnnnnnnnnnnnnnnnnnnnnnnnnnnnnnnnnnnnnnnnnnnnnnnnnnnnnnnnnnnnnnnnnnnnnnnnnnnnnnnnnnnnnnnnnnnnnnnnnnnnnnnnnnnnnnnnnnnnnnnnnnnnnnnnnnnnnnnnnnnnnnnnnnnnnnnnnnnnnnnnnnnnnnnnnnnnnnnnnnnnnnnnnnnnnnnnnnnnnnnnnnnnnnnnnnnnnnnnnnnnnnnnnnnnnnnnnnnnnnnnnnnnnnnnnnnnnnnnnnnnnnnnnnnnnnnnnnnnnnnnnnnnnnnnnnnnnnnnnnnnnnnnnnnnnnnnnnnnnnnnnnnnnnnnnnnnnnnnnnnnnnnnnnnnnnnnnnnnnnnnnnnnnnnnnnnnnnnnnnnnnnnnnnnnnnnnnnnnnnnnnnnnnnnnnnnnnnnnnnnnnnnnnnnnnnnnnnnnnnnnnnnnnnnnnnnnnnnnnnnnnnnnnnnnnnnnnnnnnnnnnnnnnnnnnnnnnnnnnnnnnnnnnnnnnnnnnnnnnnnnnnnnnnnnnnnnnnnnnnnnnnnnnnnnnnnnnnnnnnnnnnnnnnnnnnnnnnnnnnnnnnnnnnnnnnnnnnnnnnnnnnnnnnnnnnnnnnnnnnnnnnnnnnnnnnnnnnnnnnnnnnnnnnnnnnnnnnnnnnnnnnnnnnnnnnnnnnnnnnnnnnnnnnnnnnnnnnnnnnnnnnnnnnnnnnnnnnnnnnnnnnnnnnnnnnnnnnnnnnnnnnnnnnnnnnnnnnnnnnnnnnnnnnnnnnnnnnnnnnnnnnnnnnnnnnnnnnnnnnnnnnnnnnnnnnnnnnnnnnnnnnnnnnnnnnnnnnnnnnnnnnnnnnnnnnnnnnnnnnnnnnnnnnnnnnnnnnnnnnnnnnnnnnnnnnnnnnnnnnnnnnnnnnnnnnnnnnnnnnnnnnnnnnnnnnnnnnnnnnnnnnnnnnnnnnnnnnnnnnnnnnnnnnnnnnnnnnnnnnnnnnnnnnnnnnnnnnnnnnnnnnnnnnnnnnnnnnnnnnnnnnnnnnnnnnnnnnnnnnnnnnnnnnnnnnnnnnnnnnnnnnnnnnnnnnnnnnnnnnnnnnnnnnnnnnnnnnnnnnnnnnnnnnnnnnnnnnnnnnnnnnnnnnnnnnnnnnnnnnnnnnnnnnnnnnnnnnnnnnnnnnnnnnnnnnnnnnnnnnnnnnnnnnnnnnnnnnnnnnnnnnnnnnnnnnnnnnnnnnnnnnnnnnnnnnnnnnnnnnnnnnnnnnnnnnnnnnnnnnnnnnnnnnnnnnnnnnnnnnnnnnnnnnnnnnnnnnnnnnnnnnnnnnnnnnnnnnnnnnnnnnnnnnnnnnnnnnnnnnnnnnnnnnnnnnnnnnnnnnnnnnnnnnnnnnnnnnnnnnnnnnnnnnnnnnnnnnnnnnnnnnnnnnnnnnnnnnnnnnnnnnnnnnnnnnnnnnnnnnnnnnnnnnnnnnnnnnnnnnnnnnnnnnnnnnnnnnnnnnnnnnnnnnnnnnnnnnnnnnnnnnnnnnnnnnnnnnnnnnnnnnnnnnnnnnnnnnnnnnnnnnnnnnnnnnnnnnnnnnnnnnnnnnnnnnnnnnnnnnnnnnnnnnnnnnnnnnnnnnnnnnnnnnnnnnnnnnnnnnnnnnnnnnnnnnnnnnnnnnnnnnnnnnnnnnnnnnnnnnnnnnnnnnnnnnnnnnnnnnnnnnnnnnnnnnnnnnnnnnnnnnnnnnnnnnnnnnnnnnnnnnnnnnnnnnnnnnnnnnnnnnnnnnnnnnnnnnnnnnnnnnnnnnnnnnnnnnnnnnnnnnnnnnnnnnnnnnnnnnnnnnnnnnnnnnnnnnnnnnnnnnnnnnnnnnnnnnnnnnnnnnnnnnnnnnnnnnnnnnnnnnnnnnnnnnnnnnnnnnnnnnnnnnnnnnnnnnnnnnnnnnnnnnnnnnnnnnnnnnnnnnnnnnnnnnnnnnnnnnnnnnnnnnnnnnnnnnnnnnnnnnnnnnnnnnnnnnnnnnnnnnnnnnnnnnnnnnnnnnnnnnnnnnnnnnnnnnnnnnnnnnnnnnnnnnnnnnnnnnnnnnnnnnnnnnnnnnnnnnnnnnnnnnnnnnnnnnnnnnnnnnnnnnnnnnnnnnnnnnnnnnnnnnnnnnnnnnnnnnnnnnnnnnnnnnnnnnnnnnnnnnnnnnnnnnnnnnnnnnnnnnnnnnnnnnnnnnnnnnnnnnnnnnnnnnnnnnnnnnnnnnnnnnnnnnnnnnnnnnnnnnnnnnnnnnnnnnnnnnnnnnnnnnnnnnnnnnnnnnnnnnnnnnnnnnnnnnnnnnnnnnnnnnnnnnnnnnnnnnnnnnnnnnnnnnnnnnnnnnnnnnnnnnnnnnnnnnnnnnnnnnnnnnnnnnnnnnnnnnnnnnnnnnnnnnnnnnnnnnnnnnnnnnnnnnnnnnnnnnnnnnnnnnnnnnnnnnnnnnnnnnnnnnnnnnnnnnnnnnnnnnnnnnnnnnnnnnnnnnnnnnnnnnnnnnnnnnnnnnnnnnnnnnnnnnnnnnnnnnnnnnnnnnnnnnnnnnnnnnnnnnnnnnnnnnnnnnnnnnnnnnnnnnnnnnnnnnnnnnnnnnnnnnnnnnnnnnnnnnnnnnnnnnnnnnnnnnnnnnnnnnnnnnnnnnnnnnnnnnnnnnnnnnnnnnnnnnnnnnnnnnnnnnnnnnnnnnnnnnnnnnnnnnnnnnnnnnnnnnnnnnnnnnnnnnnnnnnnnnnnnnnnnnnnnnnnnnnnnnnnnnnnnnnnnnnnnnnnnnnnnnnnnnnnnnnnnnnnnnnnnnnnnnnnnnnnnnnnnnnnnnnnnnnnnnnnnnnnnnnnnnnnnnnnnnnnnnnnnnnnnnnnnnnnnnnnnnnnnnnnnnnnnnnnnnnnnnnnnnnnnnnnnnnnnnnnnnnnnnnnnnnnnnnnnnnnnnnnnnnnnnnnnnnnnnnnnnnnnnnnnnnnnnnnnnnnnnnnnnnnnnnnnnnnnnnnnnnnnnnnnnnnnnnnnnnnnnnnnnnnnnnnnnnnnnnnnnnnnnnnnnnnnnnnnnnnnnnnnnnnnnnnnnnnnnnnnnnnnnnnnnnnnnnnnnnnnnnnnnnnnnnnnnnnnnnnnnnnnnnnnnnnnnnnnnnnnnnnnnnnnnnnnnnnnnnnnnnnnnnnnnnnnnnnnnnnnnnnnnnnnnnnnnnnnnnnnnnnnnnnnnnnnnnnnnnnnnnnnnnnnnnnnnnnnnnnnnnnnnnnnnnnnnnnnnnnnnnnnnnnnnnnnnnnnnnnnnnnnnnnnnnnnnnnnnnnnnnnnnnnnnnnnnnnnnnnnnnnnnnnnnnnnnnnnnnnnnnnnnnnnnnnnnnnnnnnnnnnnnnnnnnnnnnnnnnnnnnnnnnnnnnnnnnnnnnnnnnnnnnnnnnnnnnnnnnnnnnnnnnnnnnnnnnnnnnnnnnnnnnnnnnnnnnnnnnnnnnnnnnnnnnnnnnnnnnnnnnnnnnnnnnnnnnnnnnnnnnnnnnnnnnnnnnnnnnnnnnnnnnnnnnnnnnnnnnnnnnnnnnnnnnnnnnnnnnnnnnnnnnnnnnnnnnnnnnnnnnnnnnnnnnnnnnnnnnnnnnnnnnnnnnnnnnnnnnnnnnnnnnnnnnnnnnnnnnnnnnnnnnnnnnnnnnnnnnnnnnnnnnnnnnnnnnnnnnnnnnnnnnnnnnnnnnnnnnnnnnnnnnnnnnnnnnnnnnnnnnnnnnnnnnnnnnnnnnnnnnnnnnnnnnnnnnnnnnnnnnnnnnnnnnnnnnnnnnnnnnnnnnnnnnnnnnnnnnnnnnnnnnnnnnnnnnnnnnnnnnnnnnnnnnnnnnnnnnnnnnnnnnnnnnnnnnnnnnnnnnnnnnnnnnnnnnnnnnnnnnnnnnnnnnnnnnnnnnnnnnnnnnnnnnnnnnnnnnnnnnnnnnnnnnnnnnnnnnnnnnnnnnnnnnnnnnnnnnnnnnnnnnnnnnnnnnnnnnnnnnnnnnnnnnnnnnnnnnnnnnnnnnnnnnnnnnnnnnnnnnnnnnnnnnnnnnnnnnnnnnnnnnnnnnnnnnnnnnnnnnnnnnnnnnnnnnnnnnnnnnnnnnnnnnnnnnnnnnnnnnnnnnnnnnnnnnnnnnnnnnnnnnnnnnnnnnnnnnnnnnnnnnnnnnnnnnnnnnnnnnnnnnnnnnnnnnnnnnnnnnnnnnnnnnnnnnnnnnnnnnnnnnnnnnnnnnnnnnnnnnnnnnnnnnnnnnnnnnnnnnnnnnnnnnnnnnnnnnnnnnnnnnnnnnnnnnnnnnnnnnnnnnnnnnnnnnnnnnnnnnnnnnnnnnnnnnnnnnnnnnnnnnnnnnnnnnnnnnnnnnnnnnnnnnnnnnnnnnnnnnnnnnnnnnnnnnnnnnnnnnnnnnnnnnnnnnnnnnnnnnnnnnnnnnnnnnnnnnnnnnnnnnnnnnnnnnnnnnnnnnnnnnnnnnnnnnnnnnnnnnnnnnnnnnnnnnnnnnnnnnnnnnnnnnnnnnnnnnnnnnnnnnnnnnnnnnnnnnnnnnnnnnnnnnnnnnnnnnnnnnnnnnnnnnnnnnnnnnnnnnnnnnnnnnnnnnnnnnnnnnnnnnnnnnnnnnnnnnnnnnnnnnnnnnnnnnnnnnnnnnnnnnnnnnnnnnnnnnnnnnnnnnnnnnnnnnnnnnnnnnnnnnnnnnnnnnnnnnnnnnnnnnnnnnnnnnnnnnnnnnnnnnnnnnnnnnnnnnnnnnnnnnnnnnnnnnnnnnnnnnnnnnnnnnnnnnnnnnnnnnnnnnnnnnnnnnnnnnnnnnnnnnnnnnnnnnnnnnnnnnnnnnnnnnnnnnnnnnnnnnnnnnnnnnnnnnnnnnnnnnnnnnnnnnnnnnnnnnnnnnnnnnnnnnnnnnnnnnnnnnnnnnnnnnnnnnnnnnnnnnnnnnnnnnnnnnnnnnnnnnnnnnnnnnnnnnnnnnnnnnnnnnnnnnnnnnnnnnnnnnnnnnnnnnnnnnnnnnnnnnnnnnnnnnnnnnnnnnnnnnnnnnnnnnnnnnnnnnnnnnnnnnnnnnnnnnnnnnnnnnnnnnnnnnnnnnnnnnnnnnnnnnnnnnnnnnnnnnnnnnnnnnnnnnnnnnnnnnnnnnnnnnnnnnnnnnnnnnnnnnnnnnnnnnnnnnnnnnnnnnnnnnnnnnnnnnnnnnnnnnnnnnnnnnnnnnnnnnnnnnnnnnnnnnnnnnnnnnnnnnnnnnnnnnnnnnnnnnnnnnnnnnnnnnnnnnnnnnnnnnnnnnnnnnnnnnnnnnnnnnnnnnnnnnnnnnnnnnnnnnnnnnnnnnnnnnnnnnnnnnnnnnnnnnnnnnnnnnnnnnnnnnnnnnnnnnnnnnnnnnnnnnnnnnnnnnnnnnnnnnnnnnnnnnnnnnnnnnnnnnnnnnnnnnnnnnnnnnnnnnnnnnnnnnnnnnnnnnnnnnnnnnnnnnnnnnnnnnnnnnnnnnnnnnnnnnnnnnnnnnnnnnnnnnnnnnnnnnnnnnnnnnnnnnnnnnnnnnnnnnnnnnnnnnnnnnnnnnnnnnnnnnnnnnnnnnnnnnnnnnnnnnnnnnnnnnnnnnnnnnnnnnnnnnnnnnnnnnnnnnnnnnnnnnnnnnnnnnnnnnnnnnnnnnnnnnnnnnnnnnnnnnnnnnnnnnnnnnnnnnnnnnnnnnnnnnnnnnnnnnnnnnnnnnnnnnnnnnnnnnnnnnnnnnnnnnnnnnnnnnnnnnnnnnnnnnnnnnnnnnnnnnnnnnnnnnnnnnnnnnnnnnnnnnnnnnnnnnnnnnnnnnnnnnnnnnnnnnnnnnnnnnnnnnnnnnnnnnnnnnnnnnnnnnnnnnnnnnnnnnnnnnnnnnnnnnnnnnnnnnnnnnnnnnnnnnnnnnnnnnnnnnnnnnnnnnnnnnnnnnnnnnnnnnnnnnnnnnnnnnnnnnnnnnnnnnnnnnnnnnnnnnnnnnnnnnnnnnnnnnnnnnnnnnnnnnnnnnnnnnnnnnnnnnnnnnnnnnnnnnnnnnnnnnnnnnnnnnnnnnnnnnnnnnnnnnnnnnnnnnnnnnnnnnnnnnnnnnnnnnnnnnnnnnnnnnnnnnnnnnnnnnnnnnnnnnnnnnnnnnnnnnnnnnnnnnnnnnnnnnnnnnnnnnnnnnnnnnnnnnnnnnnnnnnnnnnnnnnnnnnnnnnnnnnnnnnnnnnnnnnnnnnnnnnnnnnnnnnnnnnnnnnnnnnnnnnnnnnnnnnnnnnnnnnnnnnnnnnnnnnnnnnnnnnnnnnnnnnnnnnnnnnnnnnnnnnnnnnnnnnnnnnnnnnnnnnnnnnnnnnnnnnnnnnnnnnnnnnnnnnnnnnnnnnnnnnnnnnnnnnnnnnnnnnnnnnnnnnnnnnnnnnnnnnnnnnnnnnnnnnnnnnnnnnnnnnnnnnnnnnnnnnnnnnnnnnnnnnnnnnnnnnnnnnnnnnnnnnnnnnnnnnnnnnnnnnnnnnnnnnnnnnnnnnnnnnnnnnnnnnnnnnnnnnnnnnnnnnnnnnnnnnnnnnnnnnnnnnnnnnnnnnnnnnnnnnnnnnnnnnnnnnnnnnnnnnnnnnnnnnnnnnnnnnnnnnnnnnnnnnnnnnnnnnnnnnnnnnnnnnnnnnnnnnnnnnnnnnnnnnnnnnnnnnnnnnnnnnnnnnnnnnnnnnnnnnnnnnnnnnnnnnnnnnnnnnnnnnnnnnnnnnnnnnnnnnnnnnnnnnnnnnnnnnnnnnnnnnnnnnnnnnnnnnnnnnnnnnnnnnnnnnnnnnnnnnnnnnnnnnnnnnnnnnnnnnnnnnnnnnnnnnnnnnnnnnnnnnnnnnnnnnnnnnnnnnnnnnnnnnnnnnnnnnnnnnnnnnnnnnnnnnnnnnnnnnnnnnnnnnnnnnnnnnnnnnnnnnnnnnnnnnnnnnnnnnnnnnnnnnnnnnnnnnnnnnnnnnnnnnnnnnnnnnnnnnnnnnnnnnnnnnnnnnnnnnnnnnnnnnnnnnnnnnnnnnnnnnnnnnnnnnnnnnnnnnnnnnnnnnnnnnnnnnnnnnnnnnnnnnnnnnnnnnnnnnnnnnnnnnnnnnnnnnnnnnnnnnnnnnnnnnnnnnnnnnnnnnnnnnnnnnnnnnnnnnnnnnnnnnnnnnnnnnnnnnnnnnnnnnnnnnnnnnnnnnnnnnnnnnnnnnnnnnnnnnnnnnnnnnnnnnnnnnnnnnnnnnnnnnnnnnnnnnnnnnnnnnnnnnnnnnnnnnnnnnnnnnnnnnnnnnnnnnnnnnnnnnnnnnnnnnnnnnnnnnnnnnnnnnnnnnnnnnnnnnnnnnnnnnnnnnnnnnnnnnnnnnnnnnnnnnnnnnnnnnnnnnnnnnnnnnnnnnnnnnnnnnnnnnnnnnnnnnnnnnnnnnnnnnnnnnnnnnnnnnnnnnnnnnnnnnnnnnnnnnnnnnnnnnnnnnnnnnnnnnnnnnnnnnnnnnnnnnnnnnnnnnnnnnnnnnnnnnnnnnnnnnnnnnnnnnnnnnnnnnnnnnnnnnnnnnnnnnnnnnnnnnnnnnnnnnnnnnnnnnnnnnnnnnnnnnnnnnnnnnnnnnnnnnnnnnnnnnnnnnnnnnnnnnnnnnnnnnnnnnnnnnnnnnnnnnnnnnnnnnnnnnnnnnnnnnnnnnnnnnnnnnnnnnnnnnnnnnnnnnnnnnnnnnnnnnnnnnnnnnnnnnnnnnnnnnnnnnnnnnnnnnnnnnnnnnnnnnnnnnnnnnnnnnnnnnnnnnnnnnnnnnnnnnnnnnnnnnnnnnnnnnnnnnnnnnnnnnnnnnnnnnnnnnnnnnnnnnnnnnnnnnnnnnnnnnnnnnnnnnnnnnnnnnnnnnnnnnnnnnnnnnnnnnnnnnnnnnnnnnnnnnnnnnnnnnnnnnnnnnnnnnnnnnnnnnnnnnnnnnnnnnnnnnnnnnnnnnnnnnnnnnnnnnnnnnnnnnnnnnnnnnnnnnnnnnnnnnnnnnnnnnnnnnnnnnnnnnnnnnnnnnnnnnnnnnnnnnnnnnnnnnnnnnnnnnnnnnnnnnnnnnnnnnnnnnnnnnnnnnnnnnnnnnnnnnnnnnnnnnnnnnnnnnnnnnnnnnnnnnnnnnnnnnnnnnnnnnnnnnnnnnnnnnnnnnnnnnnnnnnnnnnnnnnnnnnnnnnnnnnnnnnnnnnnnnnnnnnnnnnnnnnnnnnnnnnnnnnnnnnnnnnnnnnnnnnnnnnnnnnnnnnnnnnnnnnnnnnnnnnnnnnnnnnnnnnnnnnnnnnnnnnnnnnnnnnnnnnnnnnnnnnnnnnnnnnnnnnnnnnnnnnnnnnnnnnnnnnnnnnnnnnnnnnnnnnnnnnnnnnnnnnnnnnnnnnnnnnnnnnnnnnnnnnnnnnnnnnnnnnnnnnnnnnnnnnnnnnnnnnnnnnnnnnnnnnnnnnnnnnnnnnnnnnnnnnnnnnnnnnnnnnnnnnnnnnnnnnnnnnnnnnnnnnnnnnnnnnnnnnnnnnnnnnnnnnnnnnnnnnnnnnnnnnnnnnnnnnnnnnnnnnnnnnnnnnnnnnnnnnnnnnnnnnnnnnnnnnnnnnnnnnnnnnnnnnnnnnnnnnnnnnnnnnnnnnnnnnnnnnnnnnnnnnnnnnnnnnnnnnnnnnnnnnnnnnnnnnnnnnnnnnnnnnnnnnnnnnnnnnnnnnnnnnnnnnnnnnnnnnnnnnnnnnnnnnnnnnnnnnnnnnnnnnnnnnnnnnnnnnnnnnnnnnnnnnnnnnnnnnnnnnnnnnnnnnnnnnnnnnnnnnnnnnnnnnnnnnnnnnnnnnnnnnnnnnnnnnnnnnnnnnnnnnnnnnnnnnnnnnnnnnnnnnnnnnnnnnnnnnnnnnnnnnnnnnnnnnnnnnnnnnnnnnnnnnnnnnnnnnnnnnnnnnnnnnnnnnnnnnnnnnnnnnnnnnnnnnnnnnnnnnnnnnnnnnnnnnnnnnnnnnnnnnnnnnnnnnnnnnnnnnnnnnnnnnnnnnnnnnnnnnnnnnnnnnnnnnnnnnnnnnnnnnnnnnnnnnnnnnnnnnnnnnnnnnnnnnnnnnnnnnnnnnnnnnnnnnnnnnnnnnnnnnnnnnnnnnnnnnnnnnnnnnnnnnnnnnnnnnnnnnnnnnnnnnnnnnnnnnnnnnnnnnnnnnnnnnnnnnnnnnnnnnnnnnnnnnnnnnnnnnnnnnnnnnnnnnnnnnnnnnnnnnnnnnnnnnnnnnnnnnnnnnnnnnnnnnnnnnnnnnnnnnnnnnnnnnnnnnnnnnnnnnnnnnnnnnnnnnnnnnnnnnnnnnnnnnnnnnnnnnnnnnnnnnnnnnnnnnnnnnnnnnnnnnnnnnnnnnnnnnnnnnnnnnnnnnnnnnnnnnnnnnnnnnnnnnnnnnnnnnnnnnnnnnnnnnnnnnnnnnnnnnnnnnnnnnnnnnnnnnnnnnnnnnnnnnnnnnnnnnnnnnnnnnnnnnnnnnnnnnnnnnnnnnnnnnnnnnnnnnnnnnnnnnnnnnnnnnnnnnnnnnnnnnnnnnnnnnnnnnnnnnnnnnnnnnnnnnnnnnnnnnnnnnnnnnnnnnnnnnnnnnnnnnnnnnnnnnnnnnnnnnnnnnnnnnnnnnnnnnnnnnnnnnnnnnnnnnnnnnnnnnnnnnnnnnnnnnnnnnnnnnnnnnnnnnnnnnnnnnnnnnnnnnnnnnnnnnnnnnnnnnnnnnnnnnnnnnnnnnnnnnnnnnnnnnnnnnnnnnnnnnnnnnnnnnnnnnnnnnnnnnnnnnnnnnnnnnnnnnnnnnnnnnnnnnnnnnnnnnnnnnnnnnnnnnnnnnnnnnnnnnnnnnnnnnnnnnnnnnnnnnnnnnnnnnnnnnnnnnnnnnnnnnnnnnnnnnnnnnnnnnnnnnnnnnnnnnnnnnnnnnnnnnnnnnnnnnnnnnnnnnnnnnnnnnnnnnnnnnnnnnnnnnnnnnnnnnnnnnnnnnnnnnnnnnnnnnnnnnnnnnnnnnnnnnnnnnnnnnnnnnnnnnnnnnnnnnnnnnnnnnnnnnnnnnnnnnnnnnnnnnnnnnnnnnnnnnnnnnnnnnnnnnnnnnnnnnnnnnnnnnnnnnnnnnnnnnnnnnnnnnnnnnnnnnnnnnnnnnnnnnnnnnnnnnnnnnnnnnnnnnnnnnnnnnnnnnnnnnnnnnnnnnnnnnnnnnnnnnnnnnnnnnnnnnnnnnnnnnnnnnnnnnnnnnnnnnnnnnnnnnnnnnnnnnnnnnnnnnnnnnnnnnnnnnnnnnnnnnnnnnnnnnnnnnnnnnnnnnnnnnnnnnnnnnnnnnnnnnnnnnnnnnnnnnnnnnnnnnnnnnnnnnnnnnnnnnnnnnnnnnnnnnnnnnnnnnnnnnnnnnnnnnnnnnnnnnnnnnnnnnnnnnnnnnnnnnnnnnnnnnnnnnnnnnnnnnnnnnnnnnnnnnnnnnnnnnnnnnnnnnnnnnnnnnnnnnnnnnnnnnnnnnnnnnnnnnnnnnnnnnnnnnnnnnnnnnnnnnnnnnnnnnnnnnnnnnnnnnnnnnnnnnnnnnnnnnnnnnnnnnnnnnnnnnnnnnnnnnnnnnnnnnnnnnnnnnnnnnnnnnnnnnnnnnnnnnnnnnnnnnnnnnnnnnnnnnnnnnnnnnnnnnnnnnnnnnnnnnnnnnnnnnnnnnnnnnnnnnnnnnnnnnnnnnnnnnnnnnnnnnnnnnnnnnnnnnnnnnnnnnnnnnnnnnnnnnnnnnnnnnnnnnnnnnnnnnnnnnnnnnnnnnnnnnnnnnnnnnnnnnnnnnnnnnnnnnnnnnnnnnnnnnnnnnnnnnnnnnnnnnnnnnnnnnnnnnnnnnnnnnnnnnnnnnnnnnnnnnnnnnnnnnnnnnnnnnnnnnnnnnnnnnnnnnnnnnnnnnnnnnnnnnnnnnnnnnnnnnnnnnnnnnnnnnnnnnnnnnnnnnnnnnnnnnnnnnnnnnnnnnnnnnnnnnnnnnnnnnnnnnnnnnnnnnnnnnnnnnnnnnnnnnnnnnnnnnnnnnnnnnnnnnnnnnnnnnnnnnnnnnnnnnnnnnnnnnnnnnnnnnnnnnnnnnnnnnnnnnnnnnnnnnnnnnnnnnnnnnnnnnnnnnnnnnnnnnnnnnnnnnnnnnnnnnnnnnnnnnnnnnnnnnnnnnnnnnnnnnnnnnnnnnnnnnnnnnnnnnnnnnnnnnnnnnnnnnnnnnnnnnnnnnnnnnnnnnnnnnnnnnnnnnnnnnnnnnnnnnnnnnnnnnnnnnnnnnnnnnnnnnnnnnnnnnnnnnnnnnnnnnnnnnnnnnnnnnnnnnnnnnnnnnnnnnnnnnnnnnnnnnnnnnnnnnnnnnnnnnnnnnnnnnnnnnnnnnnnnnnnnnnnnnnnnnnnnnnnnnnnnnnnnnnnnnnnnnnnnnnnnnnnnnnnnnnnnnnnnnnnnnnnnnnnnnnnnnnnnnnnnnnnnnnnnnnnnnnnnnnnnnnnnnnnnnnnnnnnnnnnnnnnnnnnnnnnnnnnnnnnnnnnnnnnnnnnnnnnnnnnnnnnnnnnnnnnnnnnnnnnnnnnnnnnnnnnnnnnnnnnnnnnnnnnnnnnnnnnnnnnnnnnnnnnnnnnnnnnnnnnnnnnnnnnnnnnnnnnnnnnnnnnnnnnnnnnnnnnnnnnnnnnnnnnnnnnnnnnnnnnnnnnnnnnnnnnnnnnnnnnnnnnnnnnnnnnnnnnnnnnnnnnnnnnnnnnnnnnnnnnnnnnnnnnnnnnnnnnnnnnnnnnnnnnnnnnnnnnnnnnnnnnnnnnnnnnnnnnnnnnnnnnnnnnnnnnnnnnnnnnnnnnnnnnnnnnnnnnnnnnnnnnnnnnnnnnnnnnnnnnnnnnnnnnnnnnnnnnnnnnnnnnnnnnnnnnnnnnnnnnnnnnnnnnnnnnnnnnnnnnnnnnnnnnnnnnnnnnnnnnnnnnnnnnnnnnnnnnnnnnnnnnnnnnnnnnnnnnnnnnnnnnnnnnnnnnnnnnnnnnnnnnnnnnnnnnnnnnnnnnnnnnnnnnnnnnnnnnnnnnnnnnnnnnnnnnnnnnnnnnnnnnnnnnnnnnnnnnnnnnnnnnnnnnnnnnnnnnnnnnnnnnnnnnnnnnnnnnnnnnnnnnnnnnnnnnnnnnnnnnnnnnnnnnnnnnnnnnnnnnnnnnnnnnnnnnnnnnnnnnnnnnnnnnnnnnnnnnnnnnnnnnnnnnnnnnnnnnnnnnnnnnnnnnnnnnnnnnnnnnnnnnnnnnnnnnnnnnnnnnnnnnnnnnnnnnnnnnnnnnnnnnnnnnnnnnnnnnnnnnnnnnnnnnnnnnnnnnnnnnnnnnnnnnnnnnnnnnnnnnnnnnnnnnnnnnnnnnnnnnnnnnnnnnnnnnnnnnnnnnnnnnnnnnnnnnnnnnnnnnnnnnnnnnnnnnnnnnnnnnnnnnnnnnnnnnnnnnnnnnnnnnnnnnnnnnnnnnnnnnnnnnnnnnnnnnnnnnnnnnnnnnnnnnnnnnnnnnnnnnnnnnnnnnnnnnnnnnnnnnnnnnnnnnnnnnnnnnnnnnnnnnnnnnnnnnnnnnnnnnnnnnnnnnnnnnnnnnnnnnnnnnnnnnnnnnnnnnnnnnnnnnnnnnnnnnnnnnnnnnnnnnnnnnnnnnnnnnnnnnnnnnnnnnnnnnnnnnnnnnnnnnnnnnnnnnnnnnnnnnnnnnnnnnnnnnnnnnnnnnnnnnnnnnnnnnnnnnnnnnnnnnnnnnnnnnnnnnnnnnnnnnnnnnnnnnnnnnnnnnnnnnnnnnnnnnnnnnnnnnnnnnnnnnnnnnnnnnnnnnnnnnnnnnnnnnnnnnnnnnnnnnnnnnnnnnnnnnnnnnnnnnnnnnnnnnnnnnnnnnnnnnnnnnnnnnnnnnnnnnnnnnnnnnnnnnnnnnnnnnnnnnnnnnnnnnnnnnnnnnnnnnnnnnnnnnnnnnnnnnnnnnnnnnnnnnnnnnnnnnnnnnnnnnnnnnnnnnnnnnnnnnnnnnnnnnnnnnnnnnnnnnnnnnnnnnnnnnnnnnnnnnnnnnnnnnnnnnnnnnnnnnnnnnnnnnnnnnnnnnnnnnnnnnnnnnnnnnnnnnnnnnnnnnnnnnnnnnnnnnnnnnnnnnnnnnnnnnnnnnnnnnnnnnnnnnnnnnnnnnnnnnnnnnnnnnnnnnnnnnnnnnnnnnnnnnnnnnnnnnnnnnnnnnnnnnnnnnnnnnnnnnnnnnnnnnnnnnnnnnnnnnnnnnnnnnnnnnnnnnnnnnnnnnnnnnnnnnnnnnnnnnnnnnnnnnnnnnnnnnnnnnnnnnnnnnnnnnnnnnnnnnnnnnnnnnnnnnnnnnnnnnnnnnnnnnnnnnnnnnnnnnnnnnnnnnnnnnnnnnnnnnnnnnnnnnnnnnnnnnnnnnnnnnnnnnnnnnnnnnnnnnnnnnnnnnnnnnnnnnnnnnnnnnnnnnnnnnnnnnnnnnnnnnnnnnnnnnnnnnnnnnnnnnnnnnnnnnnnnnnnnnnnnnnnnnnnnnnnnnnnnnnnnnnnnnnnnnnnnnnnnnnnnnnnnnnnnnnnnnnnnnnnnnnnnnnnnnnnnnnnnnnnnnnnnnnnnnnnnnnnnnnnnnnnnnnnnnnnnnnnnnnnnnnnnnnnnnnnnnnnnnnnnnnnnnnnnnnnnnnnnnnnnnnnnnnnnnnnnnnnnnnnnnnnnnnnnnnnnnnnnnnnnnnnnnnnnnnnnnnnnnnnnnnnnnnnnnnnnnnnnnnnnnnnnnnnnnnnnnnnnnnnnnnnnnnnnnnnnnnnnnnnnnnnnnnnnnnnnnnnnnnnnnnnnnnnnnnnnnnnnnnnnnnnnnnnnnnnnnnnnnnnnnnnnnnnnnnnnnnnnnnnnnnnnnnnnnnnnnnnnnnnnnnnnnnnnnnnnnnnnnnnnnnnnnnnnnnnnnnnnnnnnnnnnnnnnnnnnnnnnnnnnnnnnnnnnnnnnnnnnnnnnnnnnnnnnnnnnnnnnnnnnnnnnnnnnnnnnnnnnnnnnnnnnnnnnnnnnnnnnnnnnnnnnnnnnnnnnnnnnnnnnnnnnnnnnnnnnnnnnnnnnnnnnnnnnnnnnnnnnnnnnnnnnnnnnnnnnnnnnnnnnnnnnnnnnnnnnnnnnnnnnnnnnnnnnnnnnnnnnnnnnnnnnnnnnnnnnnnnnnnnnnnnnnnnnnnnnnnnnnnnnnnnnnnnnnnnnnnnnnnnnnnnnnnnnnnnnnnnnnnnnnnnnnnnnnnnnnnnnnnnnnnnnnnnnnnnnnnnnnnnnnnnnnnnnnnnnnnnnnnnnnnnnnnnnnnnnnnnnnnnnnnnnnnnnnnnnnnnnnnnnnnnnnnnnnnnnnnnnnnnnnnnnnnnnnnnnnnnnnnnnnnnnnnnnnnnnnnnnnnnnnnnnnnnnnnnnnnnnnnnnnnnnnnnnnnnnnnnnnnnnnnnnnnnnnnnnnnnnnnnnnnnnnnnnnnnnnnnnnnnnnnnnnnnnnnnnnnnnnnnnnnnnnnnnnnnnnnnnnnnnnnnnnnnnnnnnnnnnnnnnnnnnnnnnnnnnnnnnnnnnnnnnnnnnnnnnnnnnnnnnnnnnnnnnnnnnnnnnnnnnnnnnnnnnnnnnnnnnnnnnnnnnnnnnnnnnnnnnnnnnnnnnnnnnnnnnnnnnnnnnnnnnnnnnnnnnnnnnnnnnnnnnnnnnnnnnnnnnnnnnnnnnnnnnnnnnnnnnnnnnnnnnnnnnnnnnnnnnnnnnnnnnnnnnnnnnnnnnnnnnnnnnnnnnnnnnnnnnnnnnnnnnnnnnnnnnnnnnnnnnnnnnnnnnnnnnnnnnnnnnnnnnnnnnnnnnnnnnnnnnnnnnnnnnnnnnnnnnnnnnnnnnnnnnnnnnnnnnnnnnnnnnnnnnnnnnnnnnnnnnnnnnnnnnnnnnnnnnnnnnnnnnnnnnnnnnnnnnnnnnnnnnnnnnnnnnnnnnnnnnnnnnnnnnnnnnnnnnnnnnnnnnnnnnnnnnnnnnnnnnnnnnnnnnnnnnnnnnnnnnnnnnnnnnnnnnnnnnnnnnnnnnnnnnnnnnnnnnnnnnnnnnnnnnnnnnnnnnnnnnnnnnnnnnnnnnnnnnnnnnnnnnnnnnnnnnnnnnnnnnnnnnnnnnnnnnnnnnnnnnnnnnnnnnnnnnnnnnnnnnnnnnnnnnnnnnnnnnnnnnnnnnnnnnnnnnnnnnnnnnnnnnnnnnnnnnnnnnnnnnnnnnnnnnnnnnnnnnnnnnnnnnnnnnnnnnnnnnnnnnnnnnnnnnnnnnnnnnnnnnnnnnnnnnnnnnnnnnnnnnnnnnnnnnnnnnnnnnnnnnnnnnnnnnnnnnnnnnnnnnnnnnnnnnnnnnnnnnnnnnnnnnnnnnnnnnnnnnnnnnnnnnnnnnnnnnnnnnnnnnnnnnnnnnnnnnnnnnnnnnnnnnnnnnnnnnnnnnnnnnnnnnnnnnnnnnnnnnnnnnnnnnnnnnnnnnnnnnnnnnnnnnnnnnnnnnnnnnnnnnnnnnnnnnnnnnnnnnnnnnnnnnnnnnnnnnnnnnnnnnnnnnnnnnnnnnnnnnnnnnnnnnnnnnnnnnnnnnnnnnnnnnnnnnnnnnnnnnnnnnnnnnnnnnnnnnnnnnnnnnnnnnnnnnnnnnnnnnnnnnnnnnnnnnnnnnnnnnnnnnnnnnnnnnnnnnnnnnnnnnnnnnnnnnnnnnnnnnnnnnnnnnnnnnnnnnnnnnnnnnnnnnnnnnnnnnnnnnnnnnnnnnnnnnnnnnnnnnnnnnnnnnnnnnnnnnnnnnnnnnnnnnnnnnnnnnnnnnnnnnnnnnnnnnnnnnnnnnnnnnnnnnnnnnnnnnnnnnnnnnnnnnnnnnnnnnnnnnnnnnnnnnnnnnnnnnnnnnnnnnnnnnnnnnnnnnnnnnnnnnnnnnnnnnnnnnnnnnnnnnnnnnnnnnnnnnnnnnnnnnnnnnnnnnnnnnnnnnnnnnnnnnnnnnnnnnnnnnnnnnnnnnnnnnnnnnnnnnnnnnnnnnnnnnnnnnnnnnnnnnnnnnnnnnnnnnnnnnnnnnnnnnnnnnnnnnnnnnnnnnnnnnnnnnnnnnnnnnnnnnnnnnnnnnnnnnnnnnnnnnnnnnnnnnnnnnnnnnnnnnnnnnnnnnnnnnnnnnnnnnnnnnnnnnnnnnnnnnnnnnnnnnnnnnnnnnnnnnnnnnnnnnnnnnnnnnnnnnnnnnnnnnnnnnnnnnnnnnnnnnnnnnnnnnnnnnnnnnnnnnnnnnnnnnnnnnnnnnnnnnnnnnnnnnnnnnnnnnnnnnnnnnnnnnnnnnnnnnnnnnnnnnnnnnnnnnnnnnnnnnnnnnnnnnnnnnnnnnnnnnnnnnnnnnnnnnnnnnnnnnnnnnnnnnnnnnnnnnnnnnnnnnnnnnnnnnnnnnnnnnnnnnnnnnnnnnnnnnnnnnnnnnnnnnnnnnnnnnnnnnnnnnnnnnnnnnnnnnnnnnnnnnnnnnnnnnnnnnnnnnnnnnnnnnnnnnnnnnnnnnnnnnnnnnnnnnnnnnnnnnnnnnnnnnnnnnnnnnnnnnnnnnnnnnnnnnnnnnnnnnnnnnnnnnnnnnnnnnnnnnnnnnnnnnnnnnnnnnnnnnnnnnnnnnnnnnnnnnnnnnnnnnnnnnnnnnnnnnnnnnnnnnnnnnnnnnnnnnnnnnnnnnnnnnnnnnnnnnnnnnnnnnnnnnnnnnnnnnnnnnnnnnnnnnnnnnnnnnnnnnnnnnnnnnnnnnnnnnnnnnnnnnnnnnnnnnnnnnnnnnnnnnnnnnnnnnnnnnnnnnnnnnnnnnnnnnnnnnnnnnnnnnnnnnnnnnnnnnnnnnnnnnnnnnnnnnnnnnnnnnnnnnnnnnnnnnnnnnnnnnnnnnnnnnnnnnnnnnnnnnnnnnnnnnnnnnnnnnnnnnnnnnnnnnnnnnnnnnnnnnnnnnnnnnnnnnnnnnnnnnnnnnnnnnnnnnnnnnnnnnnnnnnnnnnnnnnnnnnnnnnnnnnnnnnnnnnnnnnnnnnnnnnnnnnnnnnnnnnnnnnnnnnnnnnnnnnnnnnnnnnnnnnnnnnnnnnnnnnnnnnnnnnnnnnnnnnnnnnnnnnnnnnnnnnnnnnnnnnnnnnnnnnnnnnnnnnnnnnnnnnnnnnnnnnnnnnnnnnnnnnnnnnnnnnnnnnnnnnnnnnnnnnnnnnnnnnnnnnnnnnnnnnnnnnnnnnnnnnnnnnnnnnnnnnnnnnnnnnnnnnnnnnnnnnnnnnnnnnnnnnnnnnnnnnnnnnnnnnnnnnnnnnnnnnnnnnnnnnnnnnnnnnnnnnnnnnnnnnnnnnnnnnnnnnnnnnnnnnnnnnnnnnnnnnnnnnnnnnnnnnnnnnnnnnnnnnnnnnnnnnnnnnnnnnnnnnnnnnnnnnnnnnnnnnnnnnnnnnnnnnnnnnnnnnnnnnnnnnnnnnnnnnnnnnnnnnnnnnnnnnnnnnnnnnnnnnnnnnnnnnnnnnnnnnnnnnnnnnnnnnnnnnnnnnnnnnnnnnnnnnnnnnnnnnnnnnnnnnnnnnnnnnnnnnnnnnnnnnnnnnnnnnnnnnnnnnnnnnnnnnnnnnnnnnnnnnnnnnnnnnnnnnnnnnnnnnnnnnnnnnnnnnnnnnnnnnnnnnnnnnnnnnnnnnnnnnnnnnnnnnnnnnnnnnnnnnnnnnnnnnnnnnnnnnnnnnnnnnnnnnnnnnnnnnnnnnnnnnnnnnnnnnnnnnnnnnnnnnnnnnnnnnnnnnnnnnnnnnnnnnnnnnnnnnnnnnnnnnnnnnnnnnnnnnnnnnnnnnnnnnnnnnnnnnnnnnnnnnnnnnnnnnnnnnnnnnnnnnnnnnnnnnnnnnnnnnnnnnnnnnnnnnnnnnnnnnnnnnnnnnnnnnnnnnnnnnnnnnnnnnnnnnnnnnnnnnnnnnnnnnnnnnnnnnnnnnnnnnnnnnnnnnnnnnnnnnnnnnnnnnnnnnnnnnnnnnnnnnnnnnnnnnnnnnnnnnnnnnnnnnnnnnnnnnnnnnnnnnnnnnnnnnnnnnnnnnnnnnnnnnnnnnnnnnnnnnnnnnnnnnnnnnnnnnnnnnnnnnnnnnnnnnnnnnnnnnnnnnnnnnnnnnnnnnnnnnnnnnnnnnnnnnnnnnnnnnnnnnnnnnnnnnnnnnnnnnnnnnnnnnnnnnnnnnnnnnnnnnnnnnnnnnnnnnnnnnnnnnnnnnnnnnnnnnnnnnnnnnnnnnnnnnnnnnnnnnnnnnnnnnnnnnnnnnnnnnnnnnnnnnnnnnnnnnnnnnnnnnnnnnnnnnnnnnnnnnnnnnnnnnnnnnnnnnnnnnnnnnnnnnnnnnnnnnnnnnnnnnnnnnnnnnnnnnnnnnnnnnnnnnnnnnnnnnnnnnnnnnnnnnnnnnnnnnnnnnnnnnnnnnnnnnnnnnnnnnnnnnnnnnnnnnnnnnnnnnnnnnnnnnnnnnnnnnnnnnnnnnnnnnnnnnnnnnnnnnnnnnnnnnnnnnnnnnnnnnnnnnnnnnnnnnnnnnnnnnnnnnnnnnnnnnnnnnnnnnnnnnnnnnnnnnnnnnnnnnnnnnnnnnnnnnnnnnnnnnnnnnnnnnnnnnnnnnnnnnnnnnnnnnnnnnnnnnnnnnnnnnnnnnnnnnnnnnnnnnnnnnnnnnnnnnnnnnnnnnnnnnnnnnnnnnnnnnnnnnnnnnnnnnnnnnnnnnnnnnnnnnnnnnnnnnnnnnnnnnnnnnnnnnnnnnnnnnnnnnnnnnnnnnnnnnnnnnnnnnnnnnnnnnnnnnnnnnnnnnnnnnnnnnnnnnnnnnnnnnnnnnnnnnnnnnnnnnnnnnnnnnnnnnnnnnnnnnnnnnnnnnnnnnnnnnnnnnnnnnnnnnnnnnnnnnnnnnnnnnnnnnnnnnnnnnnnnnnnnnnnnnnnnnnnnnnnnnnnnnnnnnnnnnnnnnnnnnnnnnnnnnnnnnnnnnnnnnnnnnnnnnnnnnnnnnnnnnnnnnnnnnnnnnnnnnnnnnnnnnnnnnnnnnnnnnnnnnnnnnnnnnnnnnnnnnnnnnnnnnnnnnnnnnnnnnnnnnnnnnnnnnnnnnnnnnnnnnnnnnnnnnnnnnnnnnnnnnnnnnnnnnnnnnnnnnnnnnnnnnnnnnnnnnnnnnnnnnnnnnnnnnnnnnnnnnnnnnnnnnnnnnnnnnnnnnnnnnnnnnnnnnnnnnnnnnnnnnnnnnnnnnnnnnnnnnnnnnnnnnnnnnnnnnnnnnnnnnnnnnnnnnnnnnnnnnnnnnnnnnnnnnnnnnnnnnnnnnnnnnnnnnnnnnnnnnnnnnnnnnnnnnnnnnnnnnnnnnnnnnnnnnnnnnnnnnnnnnnnnnnnnnnnnnnnnnnnnnnnnnnnnnnnnnnnnnnnnnnnnnnnnnnnnnnnnnnnnnnnnnnnnnnnnnnnnnnnnnnnnnnnnnnnnnnnnnnnnnnnnnnnnnnnnnnnnnnnnnnnnnnnnnnnnnnnnnnnnnnnnnnnnnnnnnnnnnnnnnnnnnnnnnnnnnnnnnnnnnnnnnnnnnnnnnnnnnnnnnnnnnnnnnnnnnnnnnnnnnnnnnnnnnnnnnnnnnnnnnnnnnnnnnnnnnnnnnnnnnnnnnnnnnnnnnnnnnnnnnnnnnnnnnnnnnnnnnnnnnnnnnnnnnnnnnnnnnnnnnnnnnnnnnnnnnnnnnnnnnnnnnnnnnnnnnnnnnnnnnnnnnnnnnnnnnnnnnnnnnnnnnnnnnnnnnnnnnnnnnnnnnnnnnnnnnnnnnnnnnnnnnnnnnnnnnnnnnnnnnnnnnnnnnnnnnnnnnnnnnnnnnnnnnnnnnnnnnnnnnnnnnnnnnnnnnnnnnnnnnnnnnnnnnnnnnnnnnnnnnnnnnnnnnnnnnnnnnnnnnnnnnnnnnnnnnnnnnnnnnnnnnnnnnnnnnnnnnnnnnnnnnnnnnnnnnnnnnnnnnnnnnnnnnnnnnnnnnnnnnnnnnnnnnnnnnnnnnnnnnnnnnnnnnnnnnnnnnnnnnnnnnnnnnnnnnnnnnnnnnnnnnnnnnnnnnnnnnnnnnnnnnnnnnnnnnnnnnnnnnnnnnnnnnnnnnnnnnnnnnnnnnnnnnnnnnnnnnnnnnnnnnnnnnnnnnnnnnnnnnnnnnnnnnnnnnnnnnnnnnnnnnnnnnnnnnnnnnnnnnnnnnnnnnnnnnnnnnnnnnnnnnnnnnnnnnnnnnnnnnnnnnnnnnnnnnnnnnnnnnnnnnnnnnnnnnnnnnnnnnnnnnnnnnnnnnnnnnnnnnnnnnnnnnnnnnnnnnnnnnnnnnnnnnnnnnnnnnnnnnnnnnnnnnnnnnnnnnnnnnnnnnnnnnnnnnnnnnnnnnnnnnnnnnnnnnnnnnnnnnnnnnnnnnnnnnnnnnnnnnnnnnnnnnnnnnnnnnnnnnnnnnnnnnnnnnnnnnnnnnnnnnnnnnnnnnnnnnnnnnnnnnnnnnnnnnnnnnnnnnnnnnnnnnnnnnnnnnnnnnnnnnnnnnnnnnnnnnnnnnnnnnnnnnnnnnnnnnnnnnnnnnnnnnnnnnnnnnnnnnnnnnnnnnnnnnnnnnnnnnnnnnnnnnnnnnnnnnnnnnnnnnnnnnnnnnnnnnnnnnnnnnnnnnnnnnnnnnnnnnnnnnnnnnnnnnnnnnnnnnnnnnnnnnnnnnnnnnnnnnnnnnnnnnnnnnnnnnnnnnnnnnnnnnnnnnnnnnnnnnnnnnnnnnnnnnnnnnnnnnnnnnnnnnnnnnnnnnnnnnnnnnnnnnnnnnnnnnnnnnnnnnnnnnnnnnnnnnnnnnnnnnnnnnnnnnnnnnnnnnnnnnnnnnnnnnnnnnnnnnnnnnnnnnnnnnnnnnnnnnnnnnnnnnnnnnnnnnnnnnnnnnnnnnnnnnnnnnnnnnnnnnnnnnnnnnnnnnnnnnnnnnnnnnnnnnnnnnnnnnnnnnnnnnnnnnnnnnnnnnnnnnnnnnnnnnnnnnnnnnnnnnnnnnnnnnnnnnnnnnnnnnnnnnnnnnnnnnnnnnnnnnnnnnnnnnnnnnnnnnnnnnnnnnnnnnnnnnnnnnnnnnnnnnnnnnnnnnnnnnnnnnnnnnnnnnnnnnnnnnnnnnnnnnnnnnnnnnnnnnnnnnnnnnnnnnnnnnnnnnnnnnnnnnnnnnnnnnnnnnnnnnnnnnnnnnnnnnnnnnnnnnnnnnnnnnnnnnnnnnnnnnnnnnnnnnnnnnnnnnnnnnnnnnnnnnnnnnnnnnnnnnnnnnnnnnnnnnnnnnnnnnnnnnnnnnnnnnnnnnnnnnnnnnnnnnnnnnnnnnnnnnnnnnnnnnnnnnnnnnnnnnnnnnnnnnnnnnnnnnnnnnnnnnnnnnnnnnnnnnnnnnnnnnnnnnnnnnnnnnnnnnnnnnnnnnnnnnnnnnnnnnnnnnnnnnnnnnnnnnnnnnnnnnnnnnnnnnnnnnnnnnnnnnnnnnnnnnnnnnnnnnnnnnnnnnnnnnnnnnnnnnnnnnnnnnnnnnnnnnnnnnnnnnnnnnnnnnnnnnnnnnnnnnnnnnnnnnnnnnnnnnnnnnnnnnnnnnnnnnnnnnnnnnnnnnnnnnnnnnnnnnnnnnnnnnnnnnnnnnnnnnnnnnnnnnnnnnnnnnnnnnnnnnnnnnnnnnnnnnnnnnnnnnnnnnnnnnnnnnnnnnnnnnnnnnnnnnnnnnnnnnnnnnnnnnnnnnnnnnnnnnnnnnnnnnnnnnnnnnnnnnnnnnnnnnnnnnnnnnnnnnnnnnnnnnnnnnnnnnnnnnnnnnnnnnnnnnnnnnnnnnnnnnnnnnnnnnnnnnnnnnnnnnnnnnnnnnnnnnnnnnnnnnnnnnnnnnnnnnnnnnnnnnnnnnnnnnnnnnnnnnnnnnnnnnnnnnnnnnnnnnnnnnnnnnnnnnnnnnnnnnnnnnnnnnnnnnnnnnnnnnnnnnnnnnnnnnnnnnnnnnnnnnnnnnnnnnnnnnnnnnnnnnnnnnnnnnnnnnnnnnnnnnnnnnnnnnnnnnnnnnnnnnnnnnnnnnnnnnnnnnnnnnnnnnnnnnnnnnnnnnnnnnnnnnnnnnnnnnnnnnnnnnnnnnnnnnnnnnnnnnnnnnnnnnnnnnnnnnnnnnnnnnnnnnnnnnnnnnnnnnnnnnnnnnnnnnnnnnnnnnnnnnnnnnnnnnnnnnnnnnnnnnnnnnnnnnnnnnnnnnnnnnnnnnnnnnnnnnnnnnnnnnnnnnnnnnnnnnnnnnnnnnnnnnnnnnnnnnnnnnnnnnnnnnnnnnnnnnnnnnnnnnnnnnnnnnnnnnnnnnnnnnnnnnnnnnnnnnnnnnnnnnnnnnnnnnnnnnnnnnnnnnnnnnnnnnnnnnnnnnnnnnnnnnnnnnnnnnnnnnnnnnnnnnnnnnnnnnnnnnnnnnnnnnnnnnnnnnnnnnnnnnnnnnnnnnnnnnnnnnnnnnnnnnnnnnnnnnnnnnnnnnnnnnnnnnnnnnnnnnnnnnnnnnnnnnnnnnnnnnnnnnnnnnnnnnnnnnnnnnnnnnnnnnnnnnnnnnnnnnnnnnnnnnnnnnnnnnnnnnnnnnnnnnnnnnnnnnnnnnnnnnnnnnnnnnnnnnnnnnnnnnnnnnnnnnnnnnnnnnnnnnnnnnnnnnnnnnnnnnnnnnnnnnnnnnnnnnnnnnnnnnnnnnnnnnnnnnnnnnnnnnnnnnnnnnnnnnnnnnnnnnnnnnnnnnnnnnnnnnnnnnnnnnnnnnnnnnnnnnnnnnnnnnnnnnnnnnnnnnnnnnnnnnnnnnnnnnnnnnnnnnnnnnnnnnnnnnnnnnnnnnnnnnnnnnnnnnnnnnnnnnnnnnnnnnnnnnnnnnnnnnnnnnnnnnnnnnnnnnnnnnnnnnnnnnnnnnnnnnnnnnnnnnnnnnnnnnnnnnnnnnnnnnnnnnnnnnnnnnnnnnnnnnnnnnnnnnnnnnnnnnnnnnnnnnnnnnnnnnnnnnnnnnnnnnnnnnnnnnnnnnnnnnnnnnnnnnnnnnnnnnnnnnnnnnnnnnnnnnnnnnnnnnnnnnnnnnnnnnnnnnnnnnnnnnnnnnnnnnnnnnnnnnnnnnnnnnnnnnnnnnnnnnnnnnnnnnnnnnnnnnnnnnnnnnnnnnnnnnnnnnnnnnnnnnnnnnnnnnnnnnnnnnnnnnnnnnnnnnnnnnnnnnnnnnnnnnnnnnnnnnnnnnnnnnnnnnnnnnnnnnnnnnnnnnnnnnnnnnnnnnnnnnnnnnnnnnnnnnnnnnnnnnnnnnnnnnnnnnnnnnnnnnnnnnnnnnnnnnnnnnnnnnnnnnnnnnnnnnnnnnnnnnnnnnnnnnnnnnnnnnnnnnnnnnnnnnnnnnnnnnnnnnnnnnnnnnnnnnnnnnnnnnnnnnnnnnnnnnnnnnnnnnnnnnnnnnnnnnnnnnnnnnnnnnnnnnnnnnnnnnnnnnnnnnnnnnnnnnnnnnnnnnnnnnnnnnnnnnnnnnnnnnnnnnnnnnnnnnnnnnnnnnnnnnnnnnnnnnnnnnnnnnnnnnnnnnnnnnnnnnnnnnnnnnnnnnnnnnnnnnnnnnnnnnnnnnnnnnnnnnnnnnnnnnnnnnnnnnnnnnnnnnnnnnnnnnnnnnnnnnnnnnnnnnnnnnnnnnnnnnnnnnnnnnnnnnnnnnnnnnnnnnnnnnnnnnnnnnnnnnnnnnnnnnnnnnnnnnnnnnnnnnnnnnnnnnnnnnnnnnnnnnnnnnnnnnnnnnnnnnnnnnnnnnnnnnnnnnnnnnnnnnnnnnnnnnnnnnnnnnnnnnnnnnnnnnnnnnnnnnnnnnnnnnnnnnnnnnnnnnnnnnnnnnnnnnnnnnnnnnnnnnnnnnnnnnnnnnnnnnnnnnnnnnnnnnnnnnnnnnnnnnnnnnnnnnnnnnnnnnnnnnnnnnnnnnnnnnnnnnnnnnnnnnnnnnnnnnnnnnnnnnnnnnnnnnnnnnnnnnnnnnnnnnnnnnnnnnnnnnnnnnnnnnnnnnnnnnnnnnnnnnnnnnnnnnnnnnnnnnnnnnnnnnnnnnnnnnnnnnnnnnnnnnnnnnnnnnnnnnnnnnnnnnnnnnnnnnnnnnnnnnnnnnnnnnnnnnnnnnnnnnnnnnnnnnnnnnnnnnnnnnnnnnnnnnnnnnnnnnnnnnnnnnnnnnnnnnnnnnnnnnnnnnnnnnnnnnnnnnnnnnnnnnnnnnnnnnnnnnnnnnnnnnnnnnnnnnnnnnnnnnnnnnnnnnnnnnnnnnnnnnnnnnnnnnnnnnnnnnnnnnnnnnnnnnnnnnnnnnnnnnnnnnnnnnnnnnnnnnnnnnnnnnnnnnnnnnnnnnnnnnnnnnnnnnnnnnnnnnnnnnnnnnnnnnnnnnnnnnnnnnnnnnnnnnnnnnnnnnnnnnnnnnnnnnnnnnnnnnnnnnnnnnnnnnnnnnnnnnnnnnnnnnnnnnnnnnnnnnnnnnnnnnnnnnnnnnnnnnnnnnnnnnnnnnnnnnnnnnnnnnnnnnnnnnnnnnnnnnnnnnnnnnnnnnnnnnnnnnnnnnnnnnnnnnnnnnnnnnnnnnnnnnnnnnnnnnnnnnnnnnnnnnnnnnnnnnnnnnnnnnnnnnnnnnnnnnnnnnnnnnnnnnnnnnnnnnnnnnnnnnnnnnnnnnnnnnnnnnnnnnnnnnnnnnnnnnnnnnnnnnnnnnnnnnnnnnnnnnnnnnnnnnnnnnnnnnnnnnnnnnnnnnnnnnnnnnnnnnnnnnnnnnnnnnnnnnnnnnnnnnnnnnnnnnnnnnnnnnnnnnnnnnnnnnnnnnnnnnnnnnnnnnnnnnnnnnnnnnnnnnnnnnnnnnnnnnnnnnnnnnnnnnnnnnnnnnnnnnnnnnnnnnnnnnnnnnnnnnnnnnnnnnnnnnnnnnnnnnnnnnnnnnnnnnnnnnnnnnnnnnnnnnnnnnnnnnnnnnnnnnnnnnnnnnnnnnnnnnnnnnnnnnnnnnnnnnnnnnnnnnnnnnnnnnnnnnnnnnnnnnnnnnnnnnnnnnnnnnnnnnnnnnnnnnnnnnnnnnnnnnnnnnnnnnnnnnnnnnnnnnnnnnnnnnnnnnnnnnnnnnnnnnnnnnnnnnnnnnnnnnnnnnnnnnnnnnnnnnnnnnnnnnnnnnnnnnnnnnnnnnnnnnnnnnnnnnnnnnnnnnnnnnnnnnnnnnnnnnnnnnnnnnnnnnnnnnnnnnnnnnnnnnnnnnnnnnnnnnnnnnnnnnnnnnnnnnnnnnnnnnnnnnnnnnnnnnnnnnnnnnnnnnnnnnnnnnnnnnnnnnnnnnnnnnnnnnnnnnnnnnnnnnnnnnnnnnnnnnnnnnnnnnnnnnnnnnnnnnnnnnnnnnnnnnnnnnnnnnnnnnnnnnnnnnnnnnnnnnnnnnnnnnnnnnnnnnnnnnnnnnnnnnnnnnnnnnnnnnnnnnnnnnnnnnnnnnnnnnnnnnnnnnnnnnnnnnnnnnnnnnnnnnnnnnnnnnnnnnnnnnnnnnnnnnnnnnnnnnnnnnnnnnnnnnnnnnnnnnnnnnnnnnnnnnnnnnnnnnnnnnnnnnnnnnnnnnnnnnnnnnnnnnnnnnnnnnnnnnnnnnnnnnnnnnnnnnnnnnnnnnnnnnnnnnnnnnnnnnnnnnnnnnnnnnnnnnnnnnnnnnnnnnnnnnnnnnnnnnnnnnnnnnnnnnnnnnnnnnnnnnnnnnnnnnnnnnnnnnnnnnnnnnnnnnnnnnnnnnnnnnnnnnnnnnnnnnnnnnnnnnnnnnnnnnnnnnnnnnnnnnnnnnnnnnnnnnnnnnnnnnnnnnnnnnnnnnnnnnnnnnnnnnnnnnnnnnnnnnnnnnnnnnnnnnnnnnnnnnnnnnnnnnnnnnnnnnnnnnnnnnnnnnnnnnnnnnnnnnnnnnnnnnnnnnnnnnnnnnnnnnnnnnnnnnnnnnnnnnnnnnnnnnnnnnnnnnnnnnnnnnnnnnnnnnnnnnnnnnnnnnnnnnnnnnnnnnnnnnnnnnnnnnnnnnnnnnnnnnnnnnnnnnnnnnnnnnnnnnnnnnnnnnnnnnnnnnnnnnnnnnnnnnnnnnnnnnnnnnnnnnnnnnnnnnnnnnnnnnnnnnnnnnnnnnnnnnnnnnnnnnnnnnnnnnnnnnnnnnnnnnnnnnnnnnnnnnnnnnnnnnnnnnnnnnnnnnnnnnnnnnnnnnnnnnnnnnnnnnnnnnnnnnnnnnnnnnnnnnnnnnnnnnnnnnnnnnnnnnnnnnnnnnnnnnnnnnnnnnnnnnnnnnnnnnnnnnnnnnnnnnnnnnnnnnnnnnnnnnnnnnnnnnnnnnnnnnnnnnnnnnnnnnnnnnnnnnnnnnnnnnnnnnnnnnnnnnnnnnnnnnnnnnnnnnnnnnnnnnnnnnnnnnnnnnnnnnnnnnnnnnnnnnnnnnnnnnnnnnnnnnnnnnnnnnnnnnnnnnnnnnnnnnnnnnnnnnnnnnnnnnnnnnnnnnnnnnnnnnnnnnnnnnnnnnnnnnnnnnnnnnnnnnnnnnnnnnnnnnnnnnnnnnnnnnnnnnnnnnnnnnnnnnnnnnnnnnnnnnnnnnnnnnnnnnnnnnnnnnnnnnnnnnnnnnnnnnnnnnnnnnnnnnnnnnnnnnnnnnnnnnnnnnnnnnnnnnnnnnnnnnnnnnnnnnnnnnnnnnnnnnnnnnnnnnnnnnnnnnnnnnnnnnnnnnnnnnnnnnnnnnnnnnnnnnnnnnnnnnnnnnnnnnnnnnnnnnnnnnnnnnnnnnnnnnnnnnnnnnnnnnnnnnnnnnnnnnnnnnnnnnnnnnnnnnnnnnnnnnnnnnnnnnnnnnnnnnnnnnnnnnnnnnnnnnnnnnnnnnnnnnnnnnnnnnnnnnnnnnnnnnnnnnnnnnnnnnnnnnnnnnnnnnnnnnnnnnnnnnnnnnnnnnnnnnnnnnnnnnnnnnnnnnnnnnnnnnnnnnnnnnnnnnnnnnnnnnnnnnnnnnnnnnnnnnnnnnnnnnnnnnnnnnnnnnnnnnnnnnnnnnnnnnnnnnnnnnnnnnnnnnnnnnnnnnnnnnnnnnnnnnnnnnnnnnnnnnnnnnnnnnnnnnnnnnnnnnnnnnnnnnnnnnnnnnnnnnnnnnnnnnnnnnnnnnnnnnnnnnnnnnnnnnnnnnnnnnnnnnnnnnnnnnnnnnnnnnnnnnnnnnnnnnnnnnnnnnnnnnnnnnnnnnnnnnnnnnnnnnnnnnnnnnnnnnnnnnnnnnnnnnnnnnnnnnnnnnnnnnnnnnnnnnnnnnnnnnnnnnnnnnnnnnnnnnnnnnnnnnnnnnnnnnnnnnnnnnnnnnnnnnnnnnnnnnnnnnnnnnnnnnnnnnnnnnnnnnnnnnnnnnnnnnnnnnnnnnnnnnnnnnnnnnnnnnnnnnnnnnnnnnnnnnnnnnnnnnnnnnnnnnnnnnnnnnnnnnnnnnnnnnnnnnnnnnnnnnnnnnnnnnnnnnnnnnnnnnnnnnnnnnnnnnnnnnnnnnnnnnnnnnnnnnnnnnnnnnnnnnnnnnnnnnnnnnnnnnnnnnnnnnnnnnnnnnnnnnnnnnnnnnnnnnnnnnnnnnnnnnnnnnnnnnnnnnnnnnnnnnnnnnnnnnnnnnnnnnnnnnnnnnnnnnnnnnnnnnnnnnnnnnnnnnnnnnnnnnnnnnnnnnnnnnnnnnnnnnnnnnnnnnnnnnnnnnnnnnnnnnnnnnnnnnnnnnnnnnnnnnnnnnnnnnnnnnnnnnnnnnnnnnnnnnnnnnnnnnnnnnnnnnnnnnnnnnnnnnnnnnnnnnnnnnnnnnnnnnnnnnnnnnnnnnnnnnnnnnnnnnnnnnnnnnnnnnnnnnnnnnnnnnnnnnnnnnnnnnnnnnnnnnnnnnnnnnnnnnnnnnnnnnnnnnnnnnnnnnnnnnnnnnnnnnnnnnnnnnnnnnnnnnnnnnnnnnnnnnnnnnnnnnnnnnnnnnnnnnnnnnnnnnnnnnnnnnnnnnnnnnnnnnnnnnnnnnnnnnnnnnnnnnnnnnnnnnnnnnnnnnnnnnnnnnnnnnnnnnnnnnnnnnnnnnnnnnnnnnnnnnnnnnnnnnnnnnnnnnnnnnnnnnnnnnnnnnnnnnnnnnnnnnnnnnnnnnnnnnnnnnnnnnnnnnnnnnnnnnnnnnnnnnnnnnnnnnnnnnnnnnnnnnnnnnnnnnnnnnnnnnnnnnnnnnnnnnnnnnnnnnnnnnnnnnnnnnnnnnnnnnnnnnnnnnnnnnnnnnnnnnnnnnnnnnnnnnnnnnnnnnnnnnnnnnnnnnnnnnnnnnnnnnnnnnnnnnnnnnnnnnnnnnnnnnnnnnnnnnnnnnnnnnnnnnnnnnnnnnnnnnnnnnnnnnnnnnnnnnnnnnnnnnnnnnnnnnnnnnnnnnnnnnnnnnnnnnnnnnnnnnnnnnnnnnnnnnnnnnnnnnnnnnnnnnnnnnnnnnnnnnnnnnnnnnnnnnnnnnnnnnnnnnnnnnnnnnnnnnnnnnnnnnnnnnnnnnnnnnnnnnnnnnnnnnnnnnnnnnnnnnnnnnnnnnnnnnnnnnnnnnnnnnnnnnnnnnnnnnnnnnnnnnnnnnnnnnnnnnnnnnnnnnnnnnnnnnnnnnnnnnnnnnnnnnnnnnnnnnnnnnnnnnnnnnnnnnnnnnnnnnnnnnnnnnnnnnnnnnnnnnnnnnnnnnnnnnnnnnnnnnnnnnnnnnnnnnnnnnnnnnnnnnnnnnnnnnnnnnnnnnnnnnnnnnnnnnnnnnnnnnnnnnnnnnnnnnnnnnnnnnnnnnnnnnnnnnnnnnnnnnnnnnnnnnnnnnnnnnnnnnnnnnnnnnnnnnnnnnnnnnnnnnnnnnnnnnnnnnnnnnnnnnnnnnnnnnnnnnnnnnnnnnnnnnnnnnnnnnnnnnnnnnnnnnnnnnnnnnnnnnnnnnnnnnnnnnnnnnnnnnnnnnnnnnnnnnnnnnnnnnnnnnnnnnnnnnnnnnnnnnnnnnnnnnnnnnnnnnnnnnnnnnnnnnnnnnnnnnnnnnnnnnnnnnnnnnnnnnnnnnnnnnnnnnnnnnnnnnnnnnnnnnnnnnnnnnnnnnnnnnnnnnnnnnnnnnnnnnnnnnnnnnnnnnnnnnnnnnnnnnnnnnnnnnnnnnnnnnnnnnnnnnnnnnnnnnnnnnnnnnnnnnnnnnnnnnnnnnnnnnnnnnnnnnnnnnnnnnnnnnnnnnnnnnnnnnnnnnnnnnnnnnnnnnnnnnnnnnnnnnnnnnnnnnnnnnnnnnnnnnnnnnnnnnnnnnnnnnnnnnnnnnnnnnnnnnnnnnnnnnnnnnnnnnnnnnnnnnnnnnnnnnnnnnnnnnnnnnnnnnnnnnnnnnnnnnnnnnnnnnnnnnnnnnnnnnnnnnnnnnnnnnnnnnnnnnnnnnnnnnnnnnnnnnnnnnnnnnnnnnnnnnnnnnnnnnnnnnnnnnnnnnnnnnnnnnnnnnnnnnnnnnnnnnnnnnnnnnnnnnnnnnnnnnnnnnnnnnnnnnnnnnnnnnnnnnnnnnnnnnnnnnnnnnnnnnnnnnnnnnnnnnnnnnnnnnnnnnnnnnnnnnnnnnnnnnnnnnnnnnnnnnnnnnnnnnnnnnnnnnnnnnnnnnnnnnnnnnnnnnnnnnnnnnnnnnnnnnnnnnnnnnnnnnnnnnnnnnnnnnnnnnnnnnnnnnnnnnnnnnnnnnnnnnnnnnnnnnnnnnnnnnnnnnnnnnnnnnnnnnnnnnnnnnnnnnnnnnnnnnnnnnnnnnnnnnnnnnnnnnnnnnnnnnnnnnnnnnnnnnnnnnnnnnnnnnnnnnnnnnnnnnnnnnnnnnnnnnnnnnnnnnnnnnnnnnnnnnnnnnnnnnnnnnnnnnnnnnnnnnnnnnnnnnnnnnnnnnnnnnnnnnnnnnnnnnnnnnnnnnnnnnnnnnnnnnnnnnnnnnnnnnnnnnnnnnnnnnnnnnnnnnnnnnnnnnnnnnnnnnnnnnnnnnnnnnnnnnnnnnnnnnnnnnnnnnnnnnnnnnnnnnnnnnnnnnnnnnnnnnnnnnnnnnnnnnnnnnnnnnnnnnnnnnnnnnnnnnnnnnnnnnnnnnnnnnnnnnnnnnnnnnnnnnnnnnnnnnnnnnnnnnnnnnnnnnnnnnnnnnnnnnnnnnnnnnnnnnnnnnnnnnnnnnnnnnnnnnnnnnnnnnnnnnnnnnnnnnnnnnnnnnnnnnnnnnnnnnnnnnnnnnnnnnnnnnnnnnnnnnnnnnnnnnnnnnnnnnnnnnnnnnnnnnnnnnnnnnnnnnnnnnnnnnnnnnnnnnnnnnnnnnnnnnnnnnnnnnnnnnnnnnnnnnnnnnnnnnnnnnnnnnnnnnnnnnnnnnnnnnnnnnnnnnnnnnnnnnnnnnnnnnnnnnnnnnnnnnnnnnnnnnnnnnnnnnnnnnnnnnnnnnnnnnnnnnnnnnnnnnnnnnnnnnnnnnnnnnnnnnnnnnnnnnnnnnnnnnnnnnnnnnnnnnnnnnnnnnnnnnnnnnnnnnnnnnnnnnnnnnnnnnnnnnnnnnnnnnnnnnnnnnnnnnnnnnnnnnnnnnnnnnnnnnnnnnnnnnnnnnnnnnnnnnnnnnnnnnnnnnnnnnnnnnnnnnnnnnnnnnnnnnnnnnnnnnnnnnnnnnnnnnnnnnnnnnnnnnnnnnnnnnnnnnnnnnnnnnnnnnnnnnnnnnnnnnnnnnnnnnnnnnnnnnnnnnnnnnnnnnnnnnnnnnnnnnnnnnnnnnnnnnnnnnnnnnnnnnnnnnnnnnnnnnnnnnnnnnnnnnnnnnnnnnnnnnnnnnnnnnnnnnnnnnnnnnnnnnnnnnnnnnnnnnnnnnnnnnnnnnnnnnnnnnnnnnnnnnnnnnnnnnnnnnnnnnnnnnnnnnnnnnnnnnnnnnnnnnnnnnnnnnnnnnnnnnnnnnnnnnnnnnnnnnnnnnnnnnnnnnnnnnnnnnnnnnnnnnnnnnnnnnnnnnnnnnnnnnnnnnnnnnnnnnnnnnnnnnnnnnnnnnnnnnnnnnnnnnnnnnnnnnnnnnnnnnnnnnnnnnnnnnnnnnnnnnnnnnnnnnnnnnnnnnnnnnnnnnnnnnnnnnnnnnnnnnnnnnnnnnnnnnnnnnnnnnnnnnnnnnnnnnnnnnnnnnnnnnnnnnnnnnnnnnnnnnnnnnnnnnnnnnnnnnnnnnnnnnnnnnnnnnnnnnnnnnnnnnnnnnnnnnnnnnnnnnnnnnnnnnnnnnnnnnnnnnnnnnnnnnnnnnnnnnnnnnnnnnnnnnnnnnnnnnnnnnnnnnnnnnnnnnnnnnnnnnnnnnnnnnnnnnnnnnnnnnnnnnnnnnnnnnnnnnnnnnnnnnnnnnnnnnnnnnnnnnnnnnnnnnnnnnnnnnnnnnnnnnnnnnnnnnnnnnnnnnnnnnnnnnnnnnnnnnnnnnnnnnnnnnnnnnnnnnnnnnnnnnnnnnnnnnnnnnnnnnnnnnnnnnnnnnnnnnnnnnnnnnnnnnnnnnnnnnnnnnnnnnnnnnnnnnnnnnnnnnnnnnnnnnnnnnnnnnnnnnnnnnnnnnnnnnnnnnnnnnnnnnnnnnnnnnnnnnnnnnnnnnnnnnnnnnnnnnnnnnnnnnnnnnnnnnnnnnnnnnnnnnnnnnnnnnnnnnnnnnnnnnnnnnnnnnnnnnnnnnnnnnnnnnnnnnnnnnnnnnnnnnnnnnnnnnnnnnnnnnnnnnnnnnnnnnnnnnnnnnnnnnnnnnnnnnnnnnnnnnnnnnnnnnnnnnnnnnnnnnnnnnnnnnnnnnnnnnnnnnnnnnnnnnnnnnnnnnnnnnnnnnnnnnnnnnnnnnnnnnnnnnnnnnnnnnnnnnnnnnnnnnnnnnnnnnnnnnnnnnnnnnnnnnnnnnnnnnnnnnnnnnnnnnnnnnnnnnnnnnnnnnnnnnnnnnnnnnnnnnnnnnnnnnnnnnnnnnnnnnnnnnnnnnnnnnnnnnnnnnnnnnnnnnnnnnnnnnnnnnnnnnnnnnnnnnnnnnnnnnnnnnnnnnnnnnnnnnnnnnnnnnnnnnnnnnnnnnnnnnnnnnnnnnnnnnnnnnnnnnnnnnnnnnnnnnnnnnnnnnnnnnnnnnnnnnnnnnnnnnnnnnnnnnnnnnnnnnnnnnnnnnnnnnnnnnnnnnnnnnnnnnnnnnnnnnnnnnnnnnnnnnnnnnnnnnnnnnnnnnnnnnnnnnnnnnnnnnnnnnnnnnnnnnnnnnnnnnnnnnnnnnnnnnnnnnnnnnnnnnnnnnnnnnnnnnnnnnnnnnnnnnnnnnnnnnnnnnnnnnnnnnnnnnnnnnnnnnnnnnnnnnnnnnnnnnnnnnnnnnnnnnnnnnnnnnnnnnnnnnnnnnnnnnnnnnnnnnnnnnnnnnnnnnnnnnnnnnnnnnnnnnnnnnnnnnnnnnnnnnnnnnnnnnnnnnnnnnnnnnnnnnnnnnnnnnnnnnnnnnnnnnnnnnnnnnnnnnnnnnnnnnnnnnnnnnnnnnnnnnnnnnnnnnnnnnnnnnnnnnnnnnnnnnnnnnnnnnnnnnnnnnnnnnnnnnnnnnnnnnnnnnnnnnnnnnnnnnnnnnnnnnnnnnnnnnnnnnnnnnnnnnnnnnnnnnnnnnnnnnnnnnnnnnnnnnnnnnnnnnnnnnnnnnnnnnnnnnnnnnnnnnnnnnnnnnnnnnnnnnnnnnnnnnnnnnnnnnnnnnnnnnnnnnnnnnnnnnnnnnnnnnnnnnnnnnnnnnnnnnnnnnnnnnnnnnnnnnnnnnnnnnnnnnnnnnnnnnnnnnnnnnnnnnnnnnnnnnnnnnnnnnnnnnnnnnnnnnnnnnnnnnnnnnnnnnnnnnnnnnnnnnnnnnnnnnnnnnnnnnnnnnnnnnnnnnnnnnnnnnnnnnnnnnnnnnnnnnnnnnnnnnnnnnnnnnnnnnnnnnnnnnnnnnnnnnnnnnnnnnnnnnnnnnnnnnnnnnnnnnnnnnnnnnnnnnnnnnnnnnnnnnnnnnnnnnnnnnnnnnnnnnnnnnnnnnnnnnnnnnnnnnnnnnnnnnnnnnnnnnnnnnnnnnnnnnnnnnnnnnnnnnnnnnnnnnnnnnnnnnnnnnnnnnnnnnnnnnnnnnnnnnnnnnnnnnnnnnnnnnnnnnnnnnnnnnnnnnnnnnnnnnnnnnnnnnnnnnnnnnnnnnnnnnnnnnnnnnnnnnnnnnnnnnnnnnnnnnnnnnnnnnnnnnnnnnnnnnnnnnnnnnnnnnnnnnnnnnnnnnnnnnnnnnnnnnnnnnnnnnnnnnnnnnnnnnnnnnnnnnnnnnnnnnnnnnnnnnnnnnnnnnnnnnnnnnnnnnnnnnnnnnnnnnnnnnnnnnnnnnnnnnnnnnnnnnnnnnnnnnnnnnnnnnnnnnnnnnnnnnnnnnnnnnnnnnnnnnnnnnnnnnnnnnnnnnnnnnnnnnnnnnnnnnnnnnnnnnnnnnnnnnnnnnnnnnnnnnnnnnnnnnnnnnnnnnnnnnnnnnnnnnnnnnnnnnnnnnnnnnnnnnnnnnnnnnnnnnnnnnnnnnnnnnnnnnnnnnnnnnnnnnnnnnnnnnnnnnnnnnnnnnnnnnnnnnnnnnnnnnnnnnnnnnnnnnnnnnnnnnnnnnnnnnnnnnnnnnnnnnnnnnnnnnnnnnnnnnnnnnnnnnnnnnnnnnnnnnnnnnnnnnnnnnnnnnnnnnnnnnnnnnnnnnnnnnnnnnnnnnnnnnnnnnnnnnnnnnnnnnnnnnnnnnnnnnnnnnnnnnnnnnnnnnnnnnnnnnnnnnnnnnnnnnnnnnnnnnnnnnnnnnnnnnnnnnnnnnnnnnnnnnnnnnnnnnnnnnnnnnnnnnnnnnnnnnnnnnnnnnnnnnnnnnnnnnnnnnnnnnnnnnnnnnnnnnnnnnnnnnnnnnnnnnnnnnnnnnnnnnnnnnnnnnnnnnnnnnnnnnnnnnnnnnnnnnnnnnnnnnnnnnnnnnnnnnnnnnnnnnnnnnnnnnnnnnnnnnnnnnnnnnnnnnnnnnnnnnnnnnnnnnnnnnnnnnnnnnnnnnnnnnnnnnnnnnnnnnnnnnnnnnnnnnnnnnnnnnnnnnnnnnnnnnnnnnnnnnnnnnnnnnnnnnnnnnnnnnnnnnnnnnnnnnnnnnnnnnnnnnnnnnnnnnnnnnnnnnnnnnnnnnnnnnnnnnnnnnnnnnnnnnnnnnnnnnnnnnnnnnnnnnnnnnnnnnnnnnnnnnnnnnnnnnnnnnnnnnnnnnnnnnnnnnnnnnnnnnnnnnnnnnnnnnnnnnnnnnnnnnnnnnnnnnnnnnnnnnnnnnnnnnnnnnnnnnnnnnnnnnnnnnnnnnnnnnnnnnnnnnnnnnnnnnnnnnnnnnnnnnnnnnnnnnnnnnnnnnnnnnnnnnnnnnnnnnnnnnnnnnnnnnnnnnnnnnnnnnnnnnnnnnnnnnnnnnnnnnnnnnnnnnnnnnnnnnnnnnnnnnnnnnnnnnnnnnnnnnnnnnnnnnnnnnnnnnnnnnnnnnnnnnnnnnnnnnnnnnnnnnnnnnnnnnnnnnnnnnnnnnnnnnnnnnnnnnnnnnnnnnnnnnnnnnnnnnnnnnnnnnnnnnnnnnnnnnnnnnnnnnnnnnnnnnnnnnnnnnnnnnnnnnnnnnnnnnnnnnnnnnnnnnnnnnnnnnnnnnnnnnnnnnnnnnnnnnnnnnnnnnnnnnnnnnnnnnnnnnnnnnnnnnnnnnnnnnnnnnnnnnnnnnnnnnnnnnnnnnnnnnnnnnnnnnnnnnnnnnnnnnnnnnnnnnnnnnnnnnnnnnnnnnnnnnnnnnnnnnnnnnnnnnnnnnnnnnnnnnnnnnnnnnnnnnnnnnnnnnnnnnnnnnnnnnnnnnnnnnnnnnnnnnnnnnnnnnnnnnnnnnnnnnnnnnnnnnnnnnnnnnnnnnnnnnnnnnnnnnnnnnnnnnnnnnnnnnnnnnnnnnnnnnnnnnnnnnnnnnnnnnnnnnnnnnnnnnnnnnnnnnnnnnnnnnnnnnnnnnnnnnnnnnnnnnnnnnnnnnnnnnnnnnnnnnnnnnnnnnnnnnnnnnnnnnnnnnnnnnnnnnnnnnnnnnnnnnnnnnnnnnnnnnnnnnnnnnnnnnnnnnnnnnnnnnnnnnnnnnnnnnnnnnnnnnnnnnnnnnnnnnnnnnnnnnnnnnnnnnnnnnnnnnnnnnnnnnnnnnnnnnnnnnnnnnnnnnnnnnnnnnnnnnnnnnnnnnnnnnnnnnnnnnnnnnnnnnnnnnnnnnnnnnnnnnnnnnnnnnnnnnnnnnnnnnnnnnnnnnnnnnnnnnnnnnnnnnnnnnnnnnnnnnnnnnnnnnnnnnnnnnnnnnnnnnnnnnnnnnnnnnnnnnnnnnnnnnnnnnnnnnnnnnnnnnnnnnnnnnnnnnnnnnnnnnnnnnnnnnnnnnnnnnnnnnnnnnnnnnnnnnnnnnnnnnnnnnnnnnnnnnnnnnnnnnnnnnnnnnnnnnnnnnnnnnnnnnnnnnnnnnnnnnnnnnnnnnnnnnnnnnnnnnnnnnnnnnnnnnnnnnnnnnnnnnnnnnnnnnnnnnnnnnnnnnnnnnnnnnnnnnnnnnnnnnnnnnnnnnnnnnnnnnnnnnnnnnnnnnnnnnnnnnnnnnnnnnnnnnnnnnnnnnnnnnnnnnnnnnnnnnnnnnnnnnnnnnnnnnnnnnnnnnnnnnnnnnnnnnnnnnnnnnnnnnnnnnnnnnnnnnnnnnnnnnnnnnnnnnnnnnnnnnnnnnnnnnnnnnnnnnnnnnnnnnnnnnnnnnnnnnnnnnnnnnnnnnnnnnnnnnnnnnnnnnnnnnnnnnnnnnnnnnnnnnnnnnnnnnnnnnnnnnnnnnnnnnnnnnnnnnnnnnnnnnnnnnnnnnnnnnnnnnnnnnnnnnnnnnnnnnnnnnnnnnnnnnnnnnnnnnnnnnnnnnnnnnnnnnnnnnnnnnnnnnnnnnnnnnnnnnnnnnnnnnnnnnnnnnnnnnnnnnnnnnnnnnnnnnnnnnnnnnnnnnnnnnnnnnnnnnnnnnnnnnnnnnnnnnnnnnnnnnnnnnnnnnnnnnnnnnnnnnnnnnnnnnnnnnnnnnnnnnnnnnnnnnnnnnnnnnnnnnnnnnnnnnnnnnnnnnnnnnnnnnnnnnnnnnnnnnnnnnnnnnnnnnnnnnnnnnnnnnnnnnnnnnnnnnnnnnnnnnnnnnnnnnnnnnnnnnnnnnnnnnnnnnnnnnnnnnnnnnnnnnnnnnnnnnnnnnnnnnnnnnnnnnnnnnnnnnnnnnnnnnnnnnnnnnnnnnnnnnnnnnnnnnnnnnnnnnnnnnnnnnnnnnnnnnnnnnnnnnnnnnnnnnnnnnnnnnnnnnnnnnnnnnnnnnnnnnnnnnnnnnnnnnnnnnnnnnnnnnnnnnnnnnnnnnnnnnnnnnnnnnnnnnnnnnnnnnnnnnnnnnnnnnnnnnnnnnnnnnnnnnnnnnnnnnnnnnnnnnnnnnnnnnnnnnnnnnnnnnnnnnnnnnnnnnnnnnnnnnnnnnnnnnnnnnnnnnnnnnnnnnnnnnnnnnnnnnnnnnnnnnnnnnnnnnnnnnnnnnnnnnnnnnnnnnnnnnnnnnnnnnnnnnnnnnnnnnnnnnnnnnnnnnnnnnnnnnnnnnnnnnnnnnnnnnnnnnnnnnnnnnnnnnnnnnnnnnnnnnnnnnnnnnnnnnnnnnnnnnnnnnnnnnnnnnnnnnnnnnnnnnnnnnnnnnnnnnnnnnnnnnnnnnnnnnnnnnnnnnnnnnnnnnnnnnnnnnnnnnnnnnnnnnnnnnnnnnnnnnnnnnnnnnnnnnnnnnnnnnnnnnnnnnnnnnnnnnnnnnnnnnnnnnnnnnnnnnnnnnnnnnnnnnnnnnnnnnnnnnnnnnnnnnnnnnnnnnnnnnnnnnnnnnnnnnnnnnnnnnnnnnnnnnnnnnnnnnnnnnnnnnnnnnnnnnnnnnnnnnnnnnnnnnnnnnnnnnnnnnnnnnnnnnnnnnnnnnnnnnnnnnnnnnnnnnnnnnnnnnnnnnnnnnnnnnnnnnnnnnnnnnnnnnnnnnnnnnnnnnnnnnnnnnnnnnnnnnnnnnnnnnnnnnnnnnnnnnnnnnnnnnnnnnnnnnnnnnnnnnnnnnnnnnnnnnnnnnnnnnnnnnnnnnnnnnnnnnnnnnnnnnnnnnnnnnnnnnnnnnnnnnnnnnnnnnnnnnnnnnnnnnnnnnnnnnnnnnnnnnnnnnnnnnnnnnnnnnnnnnnnnnnnnnnnnnnnnnnnnnnnnnnnnnnnnnnnnnnnnnnnnnnnnnnnnnnnnnnnnnnnnnnnnnnnnnnnnnnnnnnnnnnnnnnnnnnnnnnnnnnnnnnnnnnnnnnnnnnnnnnnnnnnnnnnnnnnnnnnnnnnnnnnnnnnnnnnnnnnnnnnnnnnnnnnnnnnnnnnnnnnnnnnnnnnnnnnnnnnnnnnnnnnnnnnnnnnnnnnnnnnnnnnnnnnnnnnnnnnnnnnnnnnnnnnnnnnnnnnnnnnnnnnnnnnnnnnnnnnnnnnnnnnnnnnnnnnnnnnnnnnnnnnnnnnnnnnnnnnnnnnnnnnnnnnnnnnnnnnnnnnnnnnnnnnnnnnnnnnnnnnnnnnnnnnnnnnnnnnnnnnnnnnnnnnnnnnnnnnnnnnnnnnnnnnnnnnnnnnnnnnnnnnnnnnnnnnnnnnnnnnnnnnnnnnnnnnnnnnnnnnnnnnnnnnnnnnnnnnnnnnnnnnnnnnnnnnnnnnnnnnnnnnnnnnnnnnnnnnnnnnnnnnnnnnnnnnnnnnnnnnnnnnnnnnnnnnnnnnnnnnnnnnnnnnnnnnnnnnnnnnnnnnnnnnnnnnnnnnnnnnnnnnnnnnnnnnnnnnnnnnnnnnnnnnnnnnnnnnnnnnnnnnnnnnnnnnnnnnnnnnnnnnnnnnnnnnnnnnnnnnnnnnnnnnnnnnnnnnnnnnnnnnnnnnnnnnnnnnnnnnnnnnnnnnnnnnnnnnnnnnnnnnnnnnnnnnnnnnnnnnnnnnnnnnnnnnnnnnnnnnnnnnnnnnnnnnnnnnnnnnnnnnnnnnnnnnnnnnnnnnnnnnnnnnnnnnnnnnnnnnnnnnnnnnnnnnnnnnnnnnnnnnnnnnnnnnnnnnnnnnnnnnnnnnnnnnnnnnnnnnnnnnnnnnnnnnnnnnnnnnnnnnnnnnnnnnnnnnnnnnnnnnnnnnnnnnnnnnnnnnnnnnnnnnnnnnnnnnnnnnnnnnnnnnnnnnnnnnnnnnnnnnnnnnnnnnnnnnnnnnnnnnnnnnnnnnnnnnnnnnnnnnnnnnnnnnnnnnnnnnnnnnnnnnnnnnnnnnnnnnnnnnnnnnnnnnnnnnnnnnnnnnnnnnnnnnnnnnnnnnnnnnnnnnnnnnnnnnnnnnnnnnnnnnnnnnnnnnnnnnnnnnnnnnnnnnnnnnnnnnnnnnnnnnnnnnnnnnnnnnnnnnnnnnnnnnnnnnnnnnnnnnnnnnnnnnnnnnnnnnnnnnnnnnnnnnnnnnnnnnnnnnnnnnnnnnnnnnnnnnnnnnnnnnnnnnnnnnnnnnnnnnnnnnnnnnnnnnnnnnnnnnnnnnnnnnnnnnnnnnnnnnnnnnnnnnnnnnnnnnnnnnnnnnnnnnnnnnnnnnnnnnnnnnnnnnnnnnnnnnnnnnnnnnnnnnnnnnnnnnnnnnnnnnnnnnnnnnnnnnnnnnnnnnnnnnnnnnnnnnnnnnnnnnnnnnnnnnnnnnnnnnnnnnnnnnnnnnnnnnnnnnnnnnnnnnnnnnnnnnnnnnnnnnnnnnnnnnnnnnnnnnnnnnnnnnnnnnnnnnnnnnnnnnnnnnnnnnnnnnnnnnnnnnnnnnnnnnnnnnnnnnnnnnnnnnnnnnnnnnnnnnnnnnnnnnnnnnnnnnnnnnnnnnnnnnnnnnnnnnnnnnnnnnnnnnnnnnnnnnnnnnnnnnnnnnnnnnnnnnnnnnnnnnnnnnnnnnnnnnnnnnnnnnnnnnnnnnnnnnnnnnnnnnnnnnnnnnnnnnnnnnnnnnnnnnnnnnnnnnnnnnnnnnnnnnnnnnnnnnnnnnnnnnnnnnnnnnnnnnnnnnnnnnnnnnnnnnnnnnnnnnnnnnnnnnnnnnnnnnnnnnnnnnnnnnnnnnnnnnnnnnnnnnnnnnnnnnnnnnnnnnnnnnnnnnnnnnnnnnnnnnnnnnnnnnnnnnnnnnnnnnnnnnnnnnnnnnnnnnnnnnnnnnnnnnnnnnnnnnnnnnnnnnnnnnnnnnnnnnnnnnnnnnnnnnnnnnnnnnnnnnnnnnnnnnnnnnnnnnnnnnnnnnnnnnnnnnnnnnnnnnnnnnnnnnnnnnnnnnnnnnnnnnnnnnnnnnnnnnnnnnnnnnnnnnnnnnnnnnnnnnnnnnnnnnnnnnnnnnnnnnnnnnnnnnnnnnnnnnnnnnnnnnnnnnnnnnnnnnnnnnnnnnnnnnnnnnnnnnnnnnnnnnnnnnnnnnnnnnnnnnnnnnnnnnnnnnnnnnnnnnnnnnnnnnnnnnnnnnnnnnnnnnnnnnnnnnnnnnnnnnnnnnnnnnnnnnnnnnnnnnnnnnnnnnnnnnnnnnnnnnnnnnnnnnnnnnnnnnnnnnnnnnnnnnnnnnnnnnnnnnnnnnnnnnnnnnnnnnnnnnnnnnnnnnnnnnnnnnnnnnnnnnnnnnnnnnnnnnnnnnnnnnnnnnnnnnnnnnnnnnnnnnnnnnnnnnnnnnnnnnnnnnnnnnnnnnnnnnnnnnnnnnnnnnnnnnnnnnnnnnnnnnnnnnnnnnnnnnnnnnnnnnnnnnnnnnnnnnnnnnnnnnnnnnnnnnnnnnnnnnnnnnnnnnnnnnnnnnnnnnnnnnnnnnnnnnnnnnnnnnnnnnnnnnnnnnnnnnnnnnnnnnnnnnnnnnnnnnnnnnnnnnnnnnnnnnnnnnnnnnnnnnnnnnnnnnnnnnnnnnnnnnnnnnnnnnnnnnnnnnnnnnnnnnnnnnnnnnnnnnnnnnnnnnnnnnnnnnnnnnnnnnnnnnnnnnnnnnnnnnnnnnnnnnnnnnnnnnnnnnnnnnnnnnnnnnnnnnnnnnnnnnnnnnnnnnnnnnnnnnnnnnnnnnnnnnnnnnnnnnnnnnnnnnnnnnnnnnnnnnnnnnnnnnnnnnnnnnnnnnnnnnnnnnnnnnnnnnnnnnnnnnnnnnnnnnnnnnnnnnnnnnnnnnnnnnnnnnnnnnnnnnnnnnnnnnnnnnnnnnnnnnnnnnnnnnnnnnnnnnnnnnnnnnnnnnnnnnnnnnnnnnnnnnnnnnnnnnnnnnnnnnnnnnnnnnnnnnnnnnnnnnnnnnnnnnnnnnnnnnnnnnnnnnnnnnnnnnnnnnnnnnnnnnnnnnnnnnnnnnnnnnnnnnnnnnnnnnnnnnnnnnnnnnnnnnnnnnnnnnnnnnnnnnnnnnnnnnnnnnnnnnnnnnnnnnnnnnnnnnnnnnnnnnnnnnnnnnnnnnnnnnnnnnnnnnnnnnnnnnnnnnnnnnnnnnnnnnnnnnnnnnnnnnnnnnnnnnnnnnnnnnnnnnnnnnnnnnnnnnnnnnnnnnnnnnnnnnnnnnnnnnnnnnnnnnnnnnnnnnnnnnnnnnnnnnnnnnnnnnnnnnnnnnnnnnnnnnnnnnnnnnnnnnnnnnnnnnnnnnnnnnnnnnnnnnnnnnnnnnnnnnnnnnnnnnnnnnnnnnnnnnnnnnnnnnnnnnnnnnnnnnnnnnnnnnnnnnnnnnnnnnnnnnnnnnnnnnnnnnnnnnnnnnnnnnnnnnnnnnnnnnnnnnnnnnnnnnnnnnnnnnnnnnnnnnnnnnnnnnnnnnnnnnnnnnnnnnnnnnnnnnnnnnnnnnnnnnnnnnnnnnnnnnnnnnnnnnnnnnnnnnnnnnnnnnnnnnnnnnnnnnnnnnnnnnnnnnnnnnnnnnnnnnnnnnnnnnnnnnnnnnnnnnnnnnnnnnnnnnnnnnnnnnnnnnnnnnnnnnnnnnnnnnnnnnnnnnnnnnnnnnnnnnnnnnnnnnnnnnnnnnnnnnnnnnnnnnnnnnnnnnnnnnnnnnnnnnnnnnnnnnnnnnnnnnnnnnnnnnnnnnnnnnnnnnnnnnnnnnnnnnnnnnnnnnnnnnnnnnnnnnnnnnnnnnnnnnnnnnnnnnnnnnnnnnnnnnnnnnnnnnnnnnnnnnnnnnnnnnnnnnnnnnnnnnnnnnnnnnnnnnnnnnnnnnnnnnnnnnnnnnnnnnnnnnnnnnnnnnnnnnnnnnnnnnnnnnnnnnnnnnnnnnnnnnnnnnnnnnnnnnnnnnnnnnnnnnnnnnnnnnnnnnnnnnnnnnnnnnnnnnnnnnnnnnnnnnnnnnnnnnnnnnnnnnnnnnnnnnnnnnnnnnnnnnnnnnnnnnnnnnnnnnnnnnnnnnnnnnnnnnnnnnnnnnnnnnnnnnnnnnnnnnnnnnnnnnnnnnnnnnnnnnnnnnnnnnnnnnnnnnnnnnnnnnnnnnnnnnnnnnnnnnnnnnnnnnnnnnnnnnnnnnnnnnnnnnnnnnnnnnnnnnnnnnnnnnnnnnnnnnnnnnnnnnnnnnnnnnnnnnnnnnnnnnnnnnnnnnnnnnnnnnnnnnnnnnnnnnnnnnnnnnnnnnnnnnnnnnnnnnnnnnnnnnnnnnnnnnnnnnnnnnnnnnnnnnnnnnnnnnnnnnnnnnnnnnnnnnnnnnnnnnnnnnnnnnnnnnnnnnnnnnnnnnnnnnnnnnnnnnnnnnnnnnnnnnnnnnnnnnnnnnnnnnnnnnnnnnnnnnnnnnnnnnnnnnnnnnnnnnnnnnnnnnnnnnnnnnnnnnnnnnnnnnnnnnnnnnnnnnnnnnnnnnnnnnnnnnnnnnnnnnnnnnnnnnnnnnnnnnnnnnnnnnnnnnnnnnnnnnnnnnnnnnnnnnnnnnnnnnnnnnnnnnnnnnnnnnnnnnnnnnnnnnnnnnnnnnnnnnnnnnnnnnnnnnnnnnnnnnnnnnnnnnnnnnnnnnnnnnnnnnnnnnnnnnnnnnnnnnnnnnnnnnnnnnnnnnnnnnnnnnnnnnnnnnnnnnnnnnnnnnnnnnnnnnnnnnnnnnnnnnnnnnnnnnnnnnnnnnnnnnnnnnnnnnnnnnnnnnnnnnnnnnnnnnnnnnnnnnnnnnnnnnnnnnnnnnnnnnnnnnnnnnnnnnnnnnnnnnnnnnnnnnnnnnnnnnnnnnnnnnnnnnnnnnnnnnnnnnnnnnnnnnnnnnnnnnnnnnnnnnnnnnnnnnnnnnnnnnnnnnnnnnnnnnnnnnnnnnnnnnnnnnnnnnnnnnnnnnnnnnnnnnnnnnnnnnnnnnnnnnnnnnnnnnnnnnnnnnnnnnnnnnnnnnnnnnnnnnnnnnnnnnnnnnnnnnnnnnnnnnnnnnnnnnnnnnnnnnnnnnnnnnnnnnnnnnnnnnnnnnnnnnnnnnnnnnnnnnnnnnnnnnnnnnnnnnnnnnnnnnnnnnnnnnnnnnnnnnnnnnnnnnnnnnnnnnnnnnnnnnnnnnnnnnnnnnnnnnnnnnnnnnnnnnnnnnnnnnnnnnnnnnnnnnnnnnnnnnnnnnnnnnnnnnnnnnnnnnnnnnnnnnnnnnnnnnnnnnnnnnnnnnnnnnnnnnnnnnnnnnnnnnnnnnnnnnnnnnnnnnnnnnnnnnnnnnnnnnnnnnnnnnnnnnnnnnnnnnnnnnnnnnnnnnnnnnnnnnnnnnnnnnnnnnnnnnnnnnnnnnnnnnnnnnnnnnnnnnnnnnnnnnnnnnnnnnnnnnnnnnnnnnnnnnnnnnnnnnnnnnnnnnnnnnnnnnnnnnnnnnnnnnnnnnnnnnnnnnnnnnnnnnnnnnnnnnnnnnnnnnnnnnnnnnnnnnnnnnnnnnnnnnnnnnnnnnnnnnnnnnnnnnnnnnnnnnnnnnnnnnnnnnnnnnnnnnnnnnnnnnnnnnnnnnnnnnnnnnnnnnnnnnnnnnnnnnnnnnnnnnnnnnnnnnnnnnnnnnnnnnnnnnnnnnnnnnnnnnnnnnnnnnnnnnnnnnnnnnnnnnnnnnnnnnnnnnnnnnnnnnnnnnnnnnnnnnnnnnnnnnnnnnnnnnnnnnnnnnnnnnnnnnnnnnnnnnnnnnnnnnnnnnnnnnnnnnnnnnnnnnnnnnnnnnnnnnnnnnnnnnnnnnnnnnnnnnnnnnnnnnnnnnnnnnnnnnnnnnnnnnnnnnnnnnnnnnnnnnnnnnnnnnnnnnnnnnnnnnnnnnnnnnnnnnnnnnnnnnnnnnnnnnnnnnnnnnnnnnnnnnnnnnnnnnnnnnnnnnnnnnnnnnnnnnnnnnnnnnnnnnnnnnnnnnnnnnnnnnnnnnnnnnnnnnnnnnnnnnnnnnnnnnnnnnnnnnnnnnnnnnnnnnnnnnnnnnnnnnnnnnnnnnnnnnnnnnnnnnnnnnnnnnnnnnnnnnnnnnnnnnnnnnnnnnnnnnnnnnnnnnnnnnnnnnnnnnnnnnnnnnnnnnnnnnnnnnnnnnnnnnnnnnnnnnnnnnnnnnnnnnnnnnnnnnnnnnnnnnnnnnnnnnnnnnnnnnnnnnnnnnnnnnnnnnnnnnnnnnnnnnnnnnnnnnnnnnnnnnnnnnnnnnnnnnnnnnnnnnnnnnnnnnnnnnnnnnnnnnnnnnnnnnnnnnnnnnnnnnnnnnnnnnnnnnnnnnnnnnnnnnnnnnnnnnnnnnnnnnnnnnnnnnnnnnnnnnnnnnnnnnnnnnnnnnnnnnnnnnnnnnnnnnnnnnnnnnnnnnnnnnnnnnnnnnnnnnnnnnnnnnnnnnnnnnnnnnnnnnnnnnnnnnnnnnnnnnnnnnnnnnnnnnnnnnnnnnnnnnnnnnnnnnnnnnnnnnnnnnnnnnnnnnnnnnnnnnnnnnnnnnnnnnnnnnnnnnnnnnnnnnnnnnnnnnnnnnnnnnnnnnnnnnnnnnnnnnnnnnnnnnnnnnnnnnnnnnnnnnnnnnnnnnnnnnnnnnnnnnnnnnnnnnnnnnnnnnnnnnnnnnnnnnnnnnnnnnnnnnnnnnnnnnnnnnnnnnnnnnnnnnnnnnnnnnnnnnnnnnnnnnnnnnnnnnnnnnnnnnnnnnnnnnnnnnnnnnnnnnnnnnnnnnnnnnnnnnnnnnnnnnnnnnnnnnnnnnnnnnnnnnnnnnnnnnnnnnnnnnnnnnnnnnnnnnnnnnnnnnnnnnnnnnnnnnnnnnnnnnnnnnnnnnnnnnnnnnnnnnnnnnnnnnnnnnnnnnnnnnnnnnnnnnnnnnnnnnnnnnnnnnnnnnnnnnnnnnnnnnnnnnnnnnnnnnnnnnnnnnnnnnnnnnnnnnnnnnnnnnnnnnnnnnnnnnnnnnnnnnnnnnnnnnnnnnnnnnnnnnnnnnnnnnnnnnnnnnnnnnnnnnnnnnnnnnnnnnnnnnnnnnnnnnnnnnnnnnnnnnnnnnnnnnnnnnnnnnnnnnnnnnnnnnnnnnnnnnnnnnnnnnnnnnnnnnnnnnnnnnnnnnnnnnnnnnnnnnnnnnnnnnnnnnnnnnnnnnnnnnnnnnnnnnnnnnnnnnnnnnnnnnnnnnnnnnnnnnnnnnnnnnnnnnnnnnnnnnnnnnnnnnnnnnnnnnnnnnnnnnnnnnnnnnnnnnnnnnnnnnnnnnnnnnnnnnnnnnnnnnnnnnnnnnnnnnnnnnnnnnnnnnnnnnnnnnnnnnnnnnnnnnnnnnnnnnnnnnnnnnnnnnnnnnnnnnnnnnnnnnnnnnnnnnnnnnnnnnnnnnnnnnnnnnnnnnnnnnnnnnnnnnnnnnnnnnnnnnnnnnnnnnnnnnnnnnnnnnnnnnnnnnnnnnnnnnnnnnnnnnnnnnnnnnnnnnnnnnnnnnnnnnnnnnnnnnnnnnnnnnnnnnnnnnnnnnnnnnnnnnnnnnnnnnnnnnnnnnnnnnnnnnnnnnnnnnnnnnnnnnnnnnnnnnnnnnnnnnnnnnnnnnnnnnnnnnnnnnnnnnnnnnnnnnnnnnnnnnnnnnnnnnnnnnnnnnnnnnnnnnnnnnnnnnnnnnnnnnnnnnnnnnnnnnnnnnnnnnnnnnnnnnnnnnnnnnnnnnnnnnnnnnnnnnnnnnnnnnnnnnnnnnnnnnnnnnnnnnnnnnnnnnnnnnnnnnnnnnnnnnnnnnnnnnnnnnnnnnnnnnnnnnnnnnnnnnnnnnnnnnnnnnnnnnnnnnnnnnnnnnnnnnnnnnnnnnnnnnnnnnnnnnnnnnnnnnnnnnnnnnnnnnnnnnnnnnnnnnnnnnnnnnnnnnnnnnnnnnnnnnnnnnnnnnnnnnnnnnnnnnnnnnnnnnnnnnnnnnnnnnnnnnnnnnnnnnnnnnnnnnnnnnnnnnnnnnnnnnnnnnnnnnnnnnnnnnnnnnnnnnnnnnnnnnnnnnnnnnnnnnnnnnnnnnnnnnnnnnnnnnnnnnnnnnnnnnnnnnnnnnnnnnnnnnnnnnnnnnnnnnnnnnnnnnnnnnnnnnnnnnnnnnnnnnnnnnnnnnnnnnnnnnnnnnnnnnnnnnnnnnnnnnnnnnnnnnnnnnnnnnnnnnnnnnnnnnnnnnnnnnnnnnnnnnnnnnnnnnnnnnnnnnnnnnnnnnnnnnnnnnnnnnnnnnnnnnnnnnnnnnnnnnnnnnnnnnnnnnnnnnnnnnnnnnnnnnnnnnnnnnnnnnnnnnnnnnnnnnnnnnnnnnnnnnnnnnnnnnnnnnnnnnnnnnnnnnnnnnnnnnnnnnnnnnnnnnnnnnnnnnnnnnnnnnnnnnnnnnnnnnnnnnnnnnnnnnnnnnnnnnnnnnnnnnnnnnnnnnnnnnnnnnnnnnnnnnnnnnnnnnnnnnnnnnnnnnnnnnnnnnnnnnnnnnnnnnnnnnnnnnnnnnnnnnnnnnnnnnnnnnnnnnnnnnnnnnnnnnnnnnnnnnnnnnnnnnnnnnnnnnnnnnnnnnnnnnnnnnnnnnnnnnnnnnnnnnnnnnnnnnnnnnnnnnnnnnnnnnnnnnnnnnnnnnnnnnnnnnnnnnnnnnnnnnnnnnnnnnnnnnnnnnnnnnnnnnnnnnnnnnnnnnnnnnnnnnnnnnnnnnnnnnnnnnnnnnnnnnnnnnnnnnnnnnnnnnnnnnnnnnnnnnnnnnnnnnnnnnnnnnnnnnnnnnnnnnnnnnnnnnnnnnnnnnnnnnnnnnnnnnnnnnnnnnnnnnnnnnnnnnnnnnnnnnnnnnnnnnnnnnnnnnnnnnnnnnnnnnnnnnnnnnnnnnnnnnnnnnnnnnnnnnnnnnnnnnnnnnnnnnnnnnnnnnnnnnnnnnnnnnnnnnnnnnnnnnnnnnnnnnnnnnnnnnnnnnnnnnnnnnnnnnnnnnnnnnnnnnnnnnnnnnnnnnnnnnnnnnnnnnnnnnnnnnnnnnnnnnnnnnnnnnnnnnnnnnnnnnnnnnnnnnnnnnnnnnnnnnnnnnnnnnnnnnnnnnnnnnnnnnnnnnnnnnnnnnnnnnnnnnnnnnnnnnnnnnnnnnnnnnnnnnnnnnnnnnnnnnnnnnnnnnnnnnnnnnnnnnnnnnnnnnnnnnnnnnnnnnnnnnnnnnnnnnnnnnnnnnnnnnnnnnnnnnnnnnnnnnnnnnnnnnnnnnnnnnnnnnnnnnnnnnnnnnnnnnnnnnnnnnnnnnnnnnnnnnnnnnnnnnnnnnnnnnnnnnnnnnnnnnnnnnnnnnnnnnnnnnnnnnnnnnnnnnnnnnnnnnnnnnnnnnnnnnnnnnnnnnnnnnnnnnnnnnnnnnnnnnnnnnnnnnnnnnnnnnnnnnnnnnnnnnnnnnnnnnnnnnnnnnnnnnnnnnnnnnnnnnnnnnnnnnnnnnnnnnnnnnnnnnnnnnnnnnnnnnnnnnnnnnnnnnnnnnnnnnnnnnnnnnnnnnnnnnnnnnnnnnnnnnnnnnnnnnnnnnnnnnnnnnnnnnnnnnnnnnnnnnnnnnnnnnnnnnnnnnnnnnnnnnnnnnnnnnnnnnnnnnnnnnnnnnnnnnnnnnnnnnnnnnnnnnnnnnnnnnnnnnnnnnnnnnnnnnnnnnnnnnnnnnnnnnnnnnnnnnnnnnnnnnnnnnnnnnnnnnnnnnnnnnnnnnnnnnnnnnnnnnnnnnnnnnnnnnnnnnnnnnnnnnnnnnnnnnnnnnnnnnnnnnnnnnnnnnnnnnnnnnnnnnnnnnnnnnnnnnnnnnnnnnnnnnnnnnnnnnnnnnnnnnnnnnnnnnnnnnnnnnnnnnnnnnnnnnnnnnnnnnnnnnnnnnnnnnnnnnnnnnnnnnnnnnnnnnnnnnnnnnnnnnnnnnnnnnnnnnnnnnnnnnnnnnnnnnnnnnnnnnnnnnnnnnnnnnnnnnnnnnnnnnnnnnnnnnnnnnnnnnnnnnnnnnnnnnnnnnnnnnnnnnnnnnnnnnnnnnnnnnnnnnnnnnnnnnnnnnnnnnnnnnnnnnnnnnnnnnnnnnnnnnnnnnnnnnnnnnnnnnnnnnnnnnnnnnnnnnnnnnnnnnnnnnnnnnnnnnnnnnnnnnnnnnnnnnnnnnnnnnnnnnnnnnnnnnnnnnnnnnnnnnnnnnnnnnnnnnnnnnnnnnnnnnnnnnnnnnnnnnnnnnnnnnnnnnnnnnnnnnnnnnnnnnnnnnnnnnnnnnnnnnnnnnnnnnnnnnnnnnnnnnnnnnnnnnnnnnnnnnnnnnnnnnnnnnnnnnnnnnnnnnnnnnnnnnnnnnnnnnnnnnnnnnnnnnnnnnnnnnnnnnnnnnnnnnnnnnnnnnnnnnnnnnnnnnnnnnnnnnnnnnnnnnnnnnnnnnnnnnnnnnnnnnnnnnnnnnnnnnnnnnnnnnnnnnnnnnnnnnnnnnnnnnnnnnnnnnnnnnnnnnnnnnnnnnnnnnnnnnnnnnnnnnnnnnnnnnnnnnnnnnnnnnnnnnnnnnnnnnnnnnnnnnnnnnnnnnnnnnnnnnnnnnnnnnnnnnnnnnnnnnnnnnnnnnnnnnnnnnnnnnnnnnnnnnnnnnnnnnnnnnnnnnnnnnnnnnnnnnnnnnnnnnnnnnnnnnnnnnnnnnnnnnnnnnnnnnnnnnnnnnnnnnnnnnnnnnnnnnnnnnnnnnnnnnnnnnnnnnnnnnnnnnnnnnnnnnnnnnnnnnnnnnnnnnnnnnnnnnnnnnnnnnnnnnnnnnnnnnnnnnnnnnnnnnnnnnnnnnnnnnnnnnnnnnnnnnnnnnnnnnnnnnnnnnnnnnnnnnnnnnnnnnnnnnnnnnnnnnnnnnnnnnnnnnnnnnnnnnnnnnnnnnnnnnnnnnnnnnnnnnnnnnnnnnnnnnnnnnnnnnnnnnnnnnnnnnnnnnnnnnnnnnnnnnnnnnnnnnnnnnnnnnnnnnnnnnnnnnnnnnnnnnnnnnnnnnnnnnnnnnnnnnnnnnnnnnnnnnnnnnnnnnnnnnnnnnnnnnnnnnnnnnnnnnnnnnnnnnnnnnnnnnnnnnnnnnnnnnnnnnnnnnnnnnnnnnnnnnnnnnnnnnnnnnnnnnnnnnnnnnnnnnnnnnnnnnnnnnnnnnnnnnnnnnnnnnnnnnnnnnnnnnnnnnnnnnnnnnnnnnnnnnnnnnnnnnnnnnnnnnnnnnnnnnnnnnnnnnnnnnnnnnnnnnnnnnnnnnnnnnnnnnnnnnnnnnnnnnnnnnnnnnnnnnnnnnnnnnnnnnnnnnnnnnnnnnnnnnnnnnnnnnnnnnnnnnnnnnnnnnnnnnnnnnnnnnnnnnnnnnnnnnnnnnnnnnnnnnnnnnnnnnnnnnnnnnnnnnnnnnnnnnnnnnnnnnnnnnnnnnnnnnnnnnnnnnnnnnnnnnnnnnnnnnnnnnnnnnnnnnnnnnnnnnnnnnnnnnnnnnnnnnnnnnnnnnnnnnnnnnnnnnnnnnnnnnnnnnnnnnnnnnnnnnnnnnnnnnnnnnnnnnnnnnnnnnnnnnnnnnnnnnnnnnnnnnnnnnnnnnnnnnnnnnnnnnnnnnnnnnnnnnnnnnnnnnnnnnnnnnnnnnnnnnnnnnnnnnnnnnnnnnnnnnnnnnnnnnnnnnnnnnnnnnnnnnnnnnnnnnnnnnnnnnnnnnnnnnnnnnnnnnnnnnnnnnnnnnnnnnnnnnnnnnnnnnnnnnnnnnnnnnnnnnnnnnnnnnnnnnnnnnnnnnnnnnnnnnnnnnnnnnnnnnnnnnnnnnnnnnnnnnnnnnnnnnnnnnnnnnnnnnnnnnnnnnnnnnnnnnnnnnnnnnnnnnnnnnnnnnnnnnnnnnnnnnnnnnnnnnnnnnnnnnnnnnnnnnnnnnnnnnnnnnnnnnnnnnnnnnnnnnnnnnnnnnnnnnnnnnnnnnnnnnnnnnnnnnnnnnnnnnnnnnnnnnnnnnnnnnnnnnnnnnnnnnnnnnnnnnnnnnnnnnnnnnnnnnnnnnnnnnnnnnnnnnnnnnnnnnnnnnnnnnnnnnnnnnnnnnnnnnnnnnnnnnnnnnnnnnnnnnnnnnnnnnnnnnnnnnnnnnnnnnnnnnnnnnnnnnnnnnnnnnnnnnnnnnnnnnnnnnnnnnnnnnnnnnnnnnnnnnnnnnnnnnnnnnnnnnnnnnnnnnnnnnnnnnnnnnnnnnnnnnnnnnnnnnnnnnnnnnnnnnnnnnnnnnnnnnnnnnnnnnnnnnnnnnnnnnnnnnnnnnnnnnnnnnnnnnnnnnnnnnnnnnnnnnnnnnnnnnnnnnnnnnnnnnnnnnnnnnnnnnnnnnnnnnnnnnnnnnnnnnnnnnnnnnnnnnnnnnnnnnnnnnnnnnnnnnnnnnnnnnnnnnnnnnnnnnnnnnnnnnnnnnnnnnnnnnnnnnnnnnnnnnnnnnnnnnnnnnnnnnnnnnnnnnnnnnnnnnnnnnnnnnnnnnnnnnnnnnnnnnnnnnnnnnnnnnnnnnnnnnnnnnnnnnnnnnnnnnnnnnnnnnnnnnnnnnnnnnnnnnnnnnnnnnnnnnnnnnnnnnnnnnnnnnnnnnnnnnnnnnnnnnnnnnnnnnnnnnnnnnnnnnnnnnnnnnnnnnnnnnnnnnnnnnnnnnnnnnnnnnnnnnnnnnnnnnnnnnnnnnnnnnnnnnnnnnnnnnnnnnnnnnnnnnnnnnnnnnnnnnnnnnnnnnnnnnnnnnnnnnnnnnnnnnnnnnnnnnnnnnnnnnnnnnnnnnnnnnnnnnnnnnnnnnnnnnnnnnnnnnnnnnnnnnnnnnnnnnnnnnnnnnnnnnnnnnnnnnnnnnnnnnnnnnnnnnnnnnnnnnnnnnnnnnnnnnnnnnnnnnnnnnnnnnnnnnnnnnnnnnnnnnnnnnnnnnnnnnnnnnnnnnnnnnnnnnnnnnnnnnnnnnnnnnnnnnnnnnnnnnnnnnnnnnnnnnnnnnnnnnnnnnnnnnnnnnnnnnnnnnnnnnnnnnnnnnnnnnnnnnnnnnnnnnnnnnnnnnnnnnnnnnnnnnnnnnnnnnnnnnnnnnnnnnnnnnnnnnnnnnnnnnnnnnnnnnnnnnnnnnnnnnnnnnnnnnnnnnnnnnnnnnnnnnnnnnnnnnnnnnnnnnnnnnnnnnnnnnnnnnnnnnnnnnnnnnnnnnnnnnnnnnnnnnnnnnnnnnnnnnnnnnnnnnnnnnnnnnnnnnnnnnnnnnnnnnnnnnnnnnnnnnnnnnnnnnnnnnnnnnnnnnnnnnnnnnnnnnnnnnnnnnnnnnnnnnnnnnnnnnnnnnnnnnnnnnnnnnnnnnnnnnnnnnnnnnnnnnnnnnnnnnnnnnnnnnnnnnnnnnnnnnnnnnnnnnnnnnnnnnnnnnnnnnnnnnnnnnnnnnnnnnnnnnnnnnnnnnnnnnnnnnnnnnnnnnnnnnnnnnnnnnnnnnnnnnnnnnnnnnnnnnnnnnnnnnnnnnnnnnnnnnnnnnnnnnnnnnnnnnnnnnnnnnnnnnnnnnnnnnnnnnnnnnnnnnnnnnnnnnnnnnnnnnnnnnnnnnnnnnnnnnnnnnnnnnnnnnnnnnnnnnnnnnnnnnnnnnnnnnnnnnnnnnnnnnnnnnnnnnnnnnnnnnnnnnnnnnnnnnnnnnnnnnnnnnnnnnnnnnnnnnnnnnnnnnnnnnnnnnnnnnnnnnnnnnnnnnnnnnnnnnnnnnnnnnnnnnnnnnnnnnnnnnnnnnnnnnnnnnnnnnnnnnnnnnnnnnnnnnnnnnnnnnnnnnnnnnnnnnnnnnnnnnnnnnnnnnnnnnnnnnnnnnnnnnnnnnnnnnnnnnnnnnnnnnnnnnnnnnnnnnnnnnnnnnnnnnnnnnnnnnnnnnnnnnnnnnnnnnnnnnnnnnnnnnnnnnnnnnnnnnnnnnnnnnnnnnnnnnnnnnnnnnnnnnnnnnnnnnnnnnnnnnnnnnnnnnnnnnnnnnnnnnnnnnnnnnnnnnnnnnnnnnnnnnnnnnnnnnnnnnnnnnnnnnnnnnnnnnnnnnnnnnnnnnnnnnnnnnnnnnnnnnnnnnnnnnnnnnnnnnnnnnnnnnnnnnnnnnnnnnnnnnnnnnnnnnnnnnnnnnnnnnnnnnnnnnnnnnnnnnnnnnnnnnnnnnnnnnnnnnnnnnnnnnnnnnnnnnnnnnnnnnnnnnnnnnnnnnnnnnnnnnnnnnnnnnnnnnnnnnnnnnnnnnnnnnnnnnnnnnnnnnnnnnnnnnnnnnnnnnnnnnnnnnnnnnnnnnnnnnnnnnnnnnnnnnnnnnnnnnnnnnnnnnnnnnnnnnnnnnnnnnnnnnnnnnnnnnnnnnnnnnnnnnnnnnnnnnnnnnnnnnnnnnnnnnnnnnnnnnnnnnnnnnnnnnnnnnnnnnnnnnnnnnnnnnnnnnnnnnnnnnnnnnnnnnnnnnnnnnnnnnnnnnnnnnnnnnnnnnnnnnnnnnnnnnnnnnnnnnnnnnnnnnnnnnnnnnnnnnnnnnnnnnnnnnnnnnnnnnnnnnnnnnnnnnnnnnnnnnnnnnnnnnnnnnnnnnnnnnnnnnnnnnnnnnnnnnnnnnnnnnnnnnnnnnnnnnnnnnnnnnnnnnnnnnnnnnnnnnnnnnnnnnnnnnnnnnnnnnnnnnnnnnnnnnnnnnnnnnnnnnnnnnnnnnnnnnnnnnnnnnnnnnnnnnnnnnnnnnnnnnnnnnnnnnnnnnnnnnnnnnnnnnnnnnnnnnnnnnnnnnnnnnnnnnnnnnnnnnnnnnnnnnnnnnnnnnnnnnnnnnnnnnnnnnnnnnnnnnnnnnnnnnnnnnnnnnnnnnnnnnnnnnnnnnnnnnnnnnnnnnnnnnnnnnnnnnnnnnnnnnnnnnnnnnnnnnnnnnnnnnnnnnnnnnnnnnnnnnnnnnnnnnnnnnnnnnnnnnnnnnnnnnnnnnnnnnnnnnnnnnnnnnnnnnnnnnnnnnnnnnnnnnnnnnnnnnnnnnnnnnnnnnnnnnnnnnnnnnnnnnnnnnnnnnnnnnnnnnnnnnnnnnnnnnnnnnnnnnnnnnnnnnnnnnnnnnnnnnnnnnnnnnnnnnnnnnnnnnnnnnnnnnnnnnnnnnnnnnnnnnnnnnnnnnnnnnnnnnnnnnnnnnnnnnnnnnnnnnnnnnnnnnnnnnnnnnnnnnnnnnnnnnnnnnnnnnnnnnnnnnnnnnnnnnnnnnnnnnnnnnnnnnnnnnnnnnnnnnnnnnnnnnnnnnnnnnnnnnnnnnnnnnnnnnnnnnnnnnnnnnnnnnnnnnnnnnnnnnnnnnnnnnnnnnnnnnnnnnnnnnnnnnnnnnnnnnnnnnnnnnnnnnnnnnnnnnnnnnnnnnnnnnnnnnnnnnnnnnnnnnnnnnnnnnnnnnnnnnnnnnnnnnnnnnnnnnnnnnnnnnnnnnnnnnnnnnnnnnnnnnnnnnnnnnnnnnnnnnnnnnnnnnnnnnnnnnnnnnnnnnnnnnnnnnnnnnnnnnnnnnnnnnnnnnnnnnnnnnnnnnnnnnnnnnnnnnnnnnnnnnnnnnnnnnnnnnnnnnnnnnnnnnnnnnnnnnnnnnnnnnnnnnnnnnnnnnnnnnnnnnnnnnnnnnnnnnnnnnnnnnnnnnnnnnnnnnnnnnnnnnnnnnnnnnnnnnnnnnnnnnnnnnnnnnnnnnnnnnnnnnnnnnnnnnnnnnnnnnnnnnnnnnnnnnnnnnnnnnnnnnnnnnnnnnnnnnnnnnnnnnnnnnnnnnnnnnnnnnnnnnnnnnnnnnnnnnnnnnnnnnnnnnnnnnnnnnnnnnnnnnnnnnnnnnnnnnnnnnnnnnnnnnnnnnnnnnnnnnnnnnnnnnnnnnnnnnnnnnnnnnnnnnnnnnnnnnnnnnnnnnnnnnnnnnnnnnnnnnnnnnnnnnnnnnnnnnnnnnnnnnnnnnnnnnnnnnnnnnnnnnnnnnnnnnnnnnnnnnnnnnnnnnnnnnnnnnnnnnnnnnnnnnnnnnnnnnnnnnnnnnnnnnnnnnnnnnnnnnnnnnnnnnnnnnnnnnnnnnnnnnnnnnnnnnnnnnnnnnnnnnnnnnnnnnnnnnnnnnnnnnnnnnnnnnnnnnnnnnnnnnnnnnnnnnnnnnnnnnnnnnnnnnnnnnnnnnnnnnnnnnnnnnnnnnnnnnnnnnnnnnnnnnnnnnnnnnnnnnnnnnnnnnnnnnnnnnnnnnnnnnnnnnnnnnnnnnnnnnnnnnnnnnnnnnnnnnnnnnnnnnnnnnnnnnnnnnnnnnnnnnnnnnnnnnnnnnnnnnnnnnnnnnnnnnnnnnnnnnnnnnnnnnnnnnnnnnnnnnnnnnnnnnnnnnnnnnnnnnnnnnnnnnnnnnnnnnnnnnnnnnnnnnnnnnnnnnnnnnnnnnnnnnnnnnnnnnnnnnnnnnnnnnnnnnnnnnnnnnnnnnnnnnnnnnnnnnnnnnnnnnnnnnnnnnnnnnnnnnnnnnnnnnnnnnnnnnnnnnnnnnnnnnnnnnnnnnnnnnnnnnnnnnnnnnnnnnnnnnnnnnnnnnnnnnnnnnnnnnnnnnnnnnnnnnnnnnnnnnnnnnnnnnnnnnnnnnnnnnnnnnnnnnnnnnnnnnnnnnnnnnnnnnnnnnnnnnnnnnnnnnnnnnnnnnnnnnnnnnnnnnnnnnnnnnnnnnnnnnnnnnnnnnnnnnnnnnnnnnnnnnnnnnnnnnnnnnnnnnnnnnnnnnnnnnnnnnnnnnnnnnnnnnnnnnnnnnnnnnnnnnnnnnnnnnnnnnnnnnnnnnnnnnnnnnnnnnnnnnnnnnnnnnnnnnnnnnnnnnnnnnnnnnnnnnnnnnnnnnnnnnnnnnnnnnnnnnnnnnnnnnnnnnnnnnnnnnnnnnnnnnnnnnnnnnnnnnnnnnnnnnnnnnnnnnnnnnnnnnnnnnnnnnnnnnnnnnnnnnnnnnnnnnnnnnnnnnnnnnnnnnnnnnnnnnnnnnnnnnnnnnnnnnnnnnnnnnnnnnnnnnnnnnnnnnnnnnnnnnnnnnnnnnnnnnnnnnnnnnnnnnnnnnnnnnnnnnnnnnnnnnnnnnnnnnnnnnnnnnnnnnnnnnnnnnnnnnnnnnnnnnnnnnnnnnnnnnnnnnnnnnnnnnnnnnnnnnnnnnnnnnnnnnnnnnnnnnnnnnnnnnnnnnnnnnnnnnnnnnnnnnnnnnnnnnnnnnnnnnnnnnnnnnnnnnnnnnnnnnnnnnnnnnnnnnnnnnnnnnnnnnnnnnnnnnnnnnnnnnnnnnnnnnnnnnnnnnnnnnnnnnnnnnnnnnnnnnnnnnnnnnnnnnnnnnnnnnnnnnnnnnnnnnnnnnnnnnnnnnnnnnnnnnnnnnnnnnnnnnnnnnnnnnnnnnnnnnnnnnnnnnnnnnnnnnnnnnnnnnnnnnnnnnnnnnnnnnnnnnnnnnnnnnnnnnnnnnnnnnnnnnnnnnnnnnnnnnnnnnnnnnnnnnnnnnnnnnnnnnnnnnnnnnnnnnnnnnnnnnnnnnnnnnnnnnnnnnnnnnnnnnnnnnnnnnnnnnnnnnnnnnnnnnnnnnnnnnnnnnnnnnnnnnnnnnnnnnnnnnnnnnnnnnnnnnnnnnnnnnnnnnnnnnnnnnnnnnnnnnnnnnnnnnnnnnnnnnnnnnnnnnnnnnnnnnnnnnnnnnnnnnnnnnnnnnnnnnnnnnnnnnnnnnnnnnnnnnnnnnnnnnnnnnnnnnnnnnnnnnnnnnnnnnnnnnnnnnnnnnnnnnnnnnnnnnnnnnnnnnnnnnnnnnnnnnnnnnnnnnnnnnnnnnnnnnnnnnnnnnnnnnnnnnnnnnnnnnnnnnnnnnnnnnnnnnnnnnnnnnnnnnnnnnnnnnnnnnnnnnnnnnnnnnnnnnnnnnnnnnnnnnnnnnnnnnnnnnnnnnnnnnnnnnnnnnnnnnnnnnnnnnnnnnnnnnnnnnnnnnnnnnnnnnnnnnnnnnnnnnnnnnnnnnnnnnnnnnnnnnnnnnnnnnnnnnnnnnnnnnnnnnnnnnnnnnnnnnnnnnnnnnnnnnnnnnnnnnnnnnnnnnnnnnnnnnnnnnnnnnnnnnnnnnnnnnnnnnnnnnnnnnnnnnnnnnnnnnnnnnnnnnnnnnnnnnnnnnnnnnnnnnnnnnnnnnnnnnnnnnnnnnnnnnnnnnnnnnnnnnnnnnnnnnnnnnnnnnnnnnnnnnnnnnnnnnnnnnnnnnnnnnnnnnnnnnnnnnnnnnnnnnnnnnnnnnnnnnnnnnnnnnnnnnnnnnnnnnnnnnnnnnnnnnnnnnnnnnnnnnnnnnnnnnnnnnnnnnnnnnnnnnnnnnnnnnnnnnnnnnnnnnnnnnnnnnnnnnnnnnnnnnnnnnnnnnnnnnnnnnnnnnnnnnnnnnnnnnnnnnnnnnnnnnnnnnnnnnnnnnnnnnnnnnnnnnnnnnnnnnnnnnnnnnnnnnnnnnnnnnnnnnnnnnnnnnnnnnnnnnnnnnnnnnnnnnnnnnnnnnnnnnnnnnnnnnnnnnnnnnnnnnnnnnnnnnnnnnnnnnnnnnnnnnnnnnnnnnnnnnnnnnnnnnnnnnnnnnnnnnnnnnnnnnnnnnnnnnnnnnnnnnnnnnnnnnnnnnnnnnnnnnnnnnnnnnnnnnnnnnnnnnnnnnnnnnnnnnnnnnnnnnnnnnnnnnnnnnnnnnnnnnnnnnnnnnnnnnnnnnnnnnnnnnnnnnnnnnnnnnnnnnnnnnnnnnnnnnnnnnnnnnnnnnnnnnnnnnnnnnnnnnnnnnnnnnnnnnnnnnnnnnnnnnnnnnnnnnnnnnnnnnnnnnnnnnnnnnnnnnnnnnnnnnnnnnnnnnnnnnnnnnnnnnnnnnnnnnnnnnnnnnnnnnnnnnnnnnnnnnnnnnnnnnnnnnnnnnnnnnnnnnnnnnnnnnnnnnnnnnnnnnnnnnnnnnnnnnnnnnnnnnnnnnnnnnnnnnnnnnnnnnnnnnnnnnnnnnnnnnnnnnnnnnnnnnnnnnnnnnnnnnnnnnnnnnnnnnnnnnnnnnnnnnnnnnnnnnnnnnnnnnnnnnnnnnnnnnnnnnnnnnnnnnnnnnnnnnnnnnnnnnnnnnnnnnnnnnnnnnnnnnnnnnnnnnnnnnnnnnnnnnnnnnnnnnnnnnnnnnnnnnnnnnnnnnnnnnnnnnnnnnnnnnnnnnnnnnnnnnnnnnnnnnnnnnnnnnnnnnnnnnnnnnnnnnnnnnnnnnnnnnnnnnnnnnnnnnnnnnnnnnnnnnnnnnnnnnnnnnnnnnnnnnnnnnnnnnnnnnnnnnnnnnnnnnnnnnnnnnnnnnnnnnnnnnnnnnnnnnnnnnnnnnnnnnnnnnnnnnnnnnnnnnnnnnnnnnnnnnnnnnnnnnnnnnnnnnnnnnnnnnnnnnnnnnnnnnnnnnnnnnnnnnnnnnnnnnnnnnnnnnnnnnnnnnnnnnnnnnnnnnnnnnnnnnnnnnnnnnnnnnnnnnnnnnnnnnnnnnnnnnnnnnnnnnnnnnnnnnnnnnnnnnnnnnnnnnnnnnnnnnnnnnnnnnnnnnnnnnnnnnnnnnnnnnnnnnnnnnnnnnnnnnnnnnnnnnnnnnnnnnnnnnnnnnnnnnnnnnnnnnnnnnnnnnnnnnnnnnnnnnnnnnnnnnnnnnnnnnnnnnnnnnnnnnnnnnnnnnnnnnnnnnnnnnnnnnnnnnnnnnnnnnnnnnnnnnnnnnnnnnnnnnnnnnnnnnnnnnnnnnnnnnnnnnnnnnnnnnnnnnnnnnnnnnnnnnnnnnnnnnnnnnnnnnnnnnnnnnnnnnnnnnnnnnnnnnnnnnnnnnnnnnnnnnnnnnnnnnnnnnnnnnnnnnnnnnnnnnnnnnnnnnnnnnnnnnnnnnnnnnnnnnnnnnnnnnnnnnnnnnnnnnnnnnnnnnnnnnnnnnnnnnnnnnnnnnnnnnnnnnnnnnnnnnnnnnnnnnnnnnnnnnnnnnnnnnnnnnnnnnnnnnnnnnnnnnnnnnnnnnnnnnnnnnnnnnnnnnnnnnnnnnnnnnnnnnnnnnnnnnnnnnnnnnnnnnnnnnnnnnnnnnnnnnnnnnnnnnnnnnnnnnnnnnnnnnnnnnnnnnnnnnnnnnnnnnnnnnnnnnnnnnnnnnnnnnnnnnnnnnnnnnnnnnnnnnnnnnnnnnnnnnnnnnnnnnnnnnnnnnnnnnnnnnnnnnnnnnnnnnnnnnnnnnnnnnnnnnnnnnnnnnnnnnnnnnnnnnnnnnnnnnnnnnnnnnnnnnnnnnnnnnnnnnnnnnnnnnnnnnnnnnnnnnnnnnnnnnnnnnnnnnnnnnnnnnnnnnnnnnnnnnnnnnnnnnnnnnnnnnnnnnnnnnnnnnnnnnnnnnnnnnnnnnnnnnnnnnnnnnnnnnnnnnnnnnnnnnnnnnnnnnnnnnnnnnnnnnnnnnnnnnnnnnnnnnnnnnnnnnnnnnnnnnnnnnnnnnnnnnnnnnnnnnnnnnnnnnnnnnnnnnnnnnnnnnnnnnnnnnnnnnnnnnnnnnnnnnnnnnnnnnnnnnnnnnnnnnnnnnnnnnnnnnnnnnnnnnnnnnnnnnnnnnnnnnnnnnnnnnnnnnnnnnnnnnnnnnnnnnnnnnnnnnnnnnnnnnnnnnnnnnnnnnnnnnnnnnnnnnnnnnnnnnnnnnnnnnnnnnnnnnnnnnnnnnnnnnnnnnnnnnnnnnnnnnnnnnnnnnnnnnnnnnnnnnnnnnnnnnnnnnnnnnnnnnnnnnnnnnnnnnnnnnnnnnnnnnnnnnnnnnnnnnnnnnnnnnnnnnnnnnnnnnnnnnnnnnnnnnnnnnnnnnnnnnnnnnnnnnnnnnnnnnnnnnnnnnnnnnnnnnnnnnnnnnnnnnnnnnnnnnnnnnnnnnnnnnnnnnnnnnnnnnnnnnnnnnnnnnnnnnnnnnnnnnnnnnnnnnnnnnnnnnnnnnnnnnnnnnnnnnnnnnnnnnnnnnnnnnnnnnnnnnnnnnnnnnnnnnnnnnnnnnnnnnnnnnnnnnnnnnnnnnnnnnnnnnnnnnnnnnnnnnnnnnnnnnnnnnnnnnnnnnnnnnnnnnnnnnnnnnnnnnnnnnnnnnnnnnnnnnnnnnnnnnnnnnnnnnnnnnnnnnnnnnnnnnnnnnnnnnnnnnnnnnnnnnnnnnnnnnnnnnnnnnnnnnnnnnnnnnnnnnnnnnnnnnnnnnnnnnnnnnnnnnnnnnnnnnnnnnnnnnnnnnnnnnnnnnnnnnnnnnnnnnnnnnnnnnnnnnnnnnnnnnnnnnnnnnnnnnnnnnnnnnnnnnnnnnnnnnnnnnnnnnnnnnnnnnnnnnnnnnnnnnnnnnnnnnnnnnnnnnnnnnnnnnnnnnnnnnnnnnnnnnnnnnnnnnnnnnnnnnnnnnnnnnnnnnnnnnnnnnnnnnnnnnnnnnnnnnnnnnnnnnnnnnnnnnnnnnnnnnnnnnnnnnnnnnnnnnnnnnnnnnnnnnnnnnnnnnnnnnnnnnnnnnnnnnnnnnnnnnnnnnnnnnnnnnnnnnnnnnnnnnnnnnnnnnnnnnnnnnnnnnnnnnnnnnnnnnnnnnnnnnnnnnnnnnnnnnnnnnnnnnnnnnnnnnnnnnnnnnnnnnnnnnnnnnnnnnnnnnnnnnnnnnnnnnnnnnnnnnnnnnnnnnnnnnnnnnnnnnnnnnnnnnnnnnnnnnnnnnnnnnnnnnnnnnnnnnnnnnnnnnnnnnnnnnnnnnnnnnnnnnnnnnnnnnnnnnnnnnnnnnnnnnnnnnnnnnnnnnnnnnnnnnnnnnnnnnnnnnnnnnnnnnnnnnnnnnnnnnnnnnnnnnnnnnnnnnnnnnnnnnnnnnnnnnnnnnnnnnnnnnnnnnnnnnnnnnnnnnnnnnnnnnnnnnnnnnnnnnnnnnnnnnnnnnnnnnnnnnnnnnnnnnnnnnnnnnnnnnnnnnnnnnnnnnnnnnnnnnnnnnnnnnnnnnnnnnnnnnnnnnnnnnnnnnnnnnnnnnnnnnnnnnnnnnnnnnnnnnnnnnnnnnnnnnnnnnnnnnnnnnnnnnnnnnnnnnnnnnnnnnnnnnnnnnnnnnnnnnnnnnnnnnnnnnnnnnnnnnnnnnnnnnnnnnnnnnnnnnnnnnnnnnnnnnnnnnnnnnnnnnnnnnnnnnnnnnnnnnnnnnnnnnnnnnnnnnnnnnnnnnnnnnnnnnnnnnnnnnnnnnnnnnnnnnnnnnnnnnnnnnnnnnnnnnnnnnnnnnnnnnnnnnnnnnnnnnnnnnnnnnnnnnnnnnnnnnnnnnnnnnnnnnnnnnnnnnnnnnnnnnnnnnnnnnnnnnnnnnnnnnnnnnnnnnnnnnnnnnnnnnnnnnnnnnnnnnnnnnnnnnnnnnnnnnnnnnnnnnnnnnnnnnnnnnnnnnnnnnnnnnnnnnnnnnnnnnnnnnnnnnnnnnnnnnnnnnnnnnnnnnnnnnnnnnnnnnnnnnnnnnnnnnnnnnnnnnnnnnnnnnnnnnnnnnnnnnnnnnnnnnnnnnnnnnnnnnnnnnnnnnnnnnnnnnnnnnnnnnnnnnnnnnnnnnnnnnnnnnnnnnnnnnnnnnnnnnnnnnnnnnnnnnnnnnnnnnnnnnnnnnnnnnnnnnnnnnnnnnnnnnnnnnnnnnnnnnnnnnnnnnnnnnnnnnnnnnnnnnnnnnnnnnnnnnnnnnnnnnnnnnnnnnnnnnnnnnnnnnnnnnnnnnnnnnnnnnnnnnnnnnnnnnnnnnnnnnnnnnnnnnnnnnnnnnnnnnnnnnnnnnnnnnnnnnnnnnnnnnnnnnnnnnnnnnnnnnnnnnnnnnnnnnnnnnnnnnnnnnnnnnnnnnnnnnnnnnnnnnnnnnnnnnnnnnnnnnnnnnnnnnnnnnnnnnnnnnnnnnnnnnnnnnnnnnnnnnnnnnnnnnnnnnnnnnnnnnnnnnnnnnnnnnnnnnnnnnnnnnnnnnnnnnnnnnnnnnnnnnnnnnnnnnnnnnnnnnnnnnnnnnnnnnnnnnnnnnnnnnnnnnnnnnnnnnnnnnnnnnnnnnnnnnnnnnnnnnnnnnnnnnnnnnnnnnnnnnnnnnnnnnnnnnnnnnnnnnnnnnnnnnnnnnnnnnnnnnnnnnnnnnnnnnnnnnnnnnnnnnnnnnnnnnnnnnnnnnnnnnnnnnnnnnnnnnnnnnnnnnnnnnnnnnnnnnnnnnnnnnnnnnnnnnnnnnnnnnnnnnnnnnnnnnnnnnnnnnnnnnnnnnnnnnnnnnnnnnnnnnnnnnnnnnnnnnnnnnnnnnnnnnnnnnnnnnnnnnnnnnnnnnnnnnnnnnnnnnnnnnnnnnnnnnnnnnnnnnnnnnnnnnnnnnnnnnnnnnnnnnnnnnnnnnnnnnnnnnnnnnnnnnnnnnnnnnnnnnnnnnnnnnnnnnnnnnnnnnnnnnnnnnnnnnnnnnnnnnnnnnnnnnnnnnnnnnnnnnnnnnnnnnnnnnnnnnnnnnnnnnnnnnnnnnnnnnnnnnnnnnnnnnnnnnnnnnnnnnnnnnnnnnnnnnnnnnnnnnnnnnnnnnnnnnnnnnnnnnnnnnnnnnnnnnnnnnnnnnnnnnnnnnnnnnnnnnnnnnnnnnnnnnnnnnnnnnnnnnnnnnnnnnnnnnnnnnnnnnnnnnnnnnnnnnnnnnnnnnnnnnnnnnnnnnnnnnnnnnnnnnnnnnnnnnnnnnnnnnnnnnnnnnnnnnnnnnnnnnnnnnnnnnnnnnnnnnnnnnnnnnnnnnnnnnnnnnnnnnnnnnnnnnnnnnnnnnnnnnnnnnnnnnnnnnnnnnnnnnnnnnnnnnnnnnnnnnnnnnnnnnnnnnnnnnnnnnnnnnnnnnnnnnnnnnnnnnnnnnnnnnnnnnnnnnnnnnnnnnnnnnnnnnnnnnnnnnnnnnnnnnnnnnnnnnnnnnnnnnnnnnnnnnnnnnnnnnnnnnnnnnnnnnnnnnnnnnnnnnnnnnnnnnnnnnnnnnnnnnnnnnnnnnnnnnnnnnnnnnnnnnnnnnnnnnnnnnnnnnnnnnnnnnnnnnnnnnnnnnnnnnnnnnnnnnnnnnnnnnnnnnnnnnnnnnnnnnnnnnnnnnnnnnnnnnnnnnnnnnnnnnnnnnnnnnnnnnnnnnnnnnnnnnnnnnnnnnnnnnnnnnnnnnnnnnnnnnnnnnnnnnnnnnnnnnnnnnnnnnnnnnnnnnnnnnnnnnnnnnnnnnnnnnnnnnnnnnnnnnnnnnnnnnnnnnnnnnnnnnnnnnnnnnnnnnnnnnnnnnnnnnnnnnnnnnnnnnnnnnnnnnnnnnnnnnnnnnnnnnnnnnnnnnnnnnnnnnnnnnnnnnnnnnnnnnnnnnnnnnnnnnnnnnnnnnnnnnnnnnnnnnnnnnnnnnnnnnnnnnnnnnnnnnnnnnnnnnnnnnnnnnnnnnnnnnnnnnnnnnnnnnnnnnnnnnnnnnnnnnnnnnnnnnnnnnnnnnnnnnnnnnnnnnnnnnnnnnnnnnnnnnnnnnnnnnnnnnnnnnnnnnnnnnnnnnnnnnnnnnnnnnnnnnnnnnnnnnnnnnnnnnnnnnnnnnnnnnnnnnnnnnnnnnnnnnnnnnnnnnnnnnnnnnnnnnnnnnnnnnnnnnnnnnnnnnnnnnnnnnnnnnnnnnnnnnnnnnnnnnnnnnnnnnnnnnnnnnnnnnnnnnnnnnnnnnnnnnnnnnnnnnnnnnnnnnnnnnnnnnnnnnnnnnnnnnnnnnnnnnnnnnnnnnnnnnnnnnnnnnnnnnnnnnnnnnnnnnnnnnnnnnnnnnnnnnnnnnnnnnnnnnnnnnnnnnnnnnnnnnnnnnnnnnnnnnnnnnnnnnnnnnnnnnnnnnnnnnnnnnnnnnnnnnnnnnnnnnnnnnnnnnnnnnnnnnnnnnnnnnnnnnnnnnnnnnnnnnnnnnnnnnnnnnnnnnnnnnnnnnnnnnnnnnnnnnnnnnnnnnnnnnnnnnnnnnnnnnnnnnnnnnnnnnnnnnnnnnnnnnnnnnnnnnnnnnnnnnnnnnnnnnnnnnnnnnnnnnnnnnnnnnnnnnnnnnnnnnnnnnnnnnnnnnnnnnnnnnnnnnnnnnnnnnnnnnnnnnnnnnnnnnnnnnnnnnnnnnnnnnnnnnnnnnnnnnnnnnnnnnnnnnnnnnnnnnnnnnnnnnnnnnnnnnnnnnnnnnnnnnnnnnnnnnnnnnnnnnnnnnnnnnnnnnnnnnnnnnnnnnnnnnnnnnnnnnnnnnnnnnnnnnnnnnnnnnnnnnnnnnnnnnnnnnnnnnnnnnnnnnnnnnnnnnnnnnnnnnnnnnnnnnnnnnnnnnnnnnnnnnnnnnnnnnnnnnnnnnnnnnnnnnnnnnnnnnnnnnnnnnnnnnnnnnnnnnnnnnnnnnnnnnnnnnnnnnnnnnnnnnnnnnnnnnnnnnnnnnnnnnnnnnnnnnnnnnnnnnnnnnnnnnnnnnnnnnnnnnnnnnnnnnnnnnnnnnnnnnnnnnnnnnnnnnnnnnnnnnnnnnnnnnnnnnnnnnnnnnnnnnnnnnnnnnnnnnnnnnnnnnnnnnnnnnnnnnnnnnnnnnnnnnnnnnnnnnnnnnnnnnnnnnnnnnnnnnnnnnnnnnnnnnnnnnnnnnnnnnnnnnnnnnnnnnnnnnnnnnnnnnnnnnnnnnnnnnnnnnnnnnnnnnnnnnnnnnnnnnnnnnnnnnnnnnnnnnnnnnnnnnnnnnnnnnnnnnnnnnnnnnnnnnnnnnnnnnnnnnnnnnnnnnnnnnnnnnnnnnnnnnnnnnnnnnnnnnnnnnnnnnnnnnnnnnnnnnnnnnnnnnnnnnnnnnnnnnnnnnnnnnnnnnnnnnnnnnnnnnnnnnnnnnnnnnnnnnnnnnnnnnnnnnnnnnnnnnnnnnnnnnnnnnnnnnnnnnnnnnnnnnnnnnnnnnnnnnnnnnnnnnnnnnnnnnnnnnnnnnnnnnnnnnnnnnnnnnnnnnnnnnnnnnnnnnnnnnnnnnnnnnnnnnnnnnnnnnnnnnnnnnnnnnnnnnnnnnnnnnnnnnnnnnnnnnnnnnnnnnnnnnnnnnnnnnnnnnnnnnnnnnnnnnnnnnnnnnnnnnnnnnnnnnnnnnnnnnnnnnnnnnnnnnnnnnnnnnnnnnnnnnnnnnnnnnnnnnnnnnnnnnnnnnnnnnnnnnnnnnnnnnnnnnnnnnnnnnnnnnnnnnnnnnnnnnnnnnnnnnnnnnnnnnnnnnnnnnnnnnnnnnnnnnnnnnnnnnnnnnnnnnnnnnnnnnnnnnnnnnnnnnnnnnnnnnnnnnnnnnnnnnnnnnnnnnnnnnnnnnnnnnnnnnnnnnnnnnnnnnnnnnnnnnnnnnnnnnnnnnnnnnnnnnnnnnnnnnnnnnnnnnnnnnnnnnnnnnnnnnnnnnnnnnnnnnnnnnnnnnnnnnnnnnnnnnnnnnnnnnnnnnnnnnnnnnnnnnnnnnnnnnnnnnnnnnnnnnnnnnnnnnnnnnnnnnnnnnnnnnnnnnnnnnnnnnnnnnnnnnnnnnnnnnnnnnnnnnnnnnnnnnnnnnnnnnnnnnnnnnnnnnnnnnnnnnnnnnnnnnnnnnnnnnnnnnnnnnnnnnnnnnnnnnnnnnnnnnnnnnnnnnnnnnnnnnnnnnnnnnnnnnnnnnnnnnnnnnnnnnnnnnnnnnnnnnnnnnnnnnnnnnnnnnnnnnnnnnnnnnnnnnnnnnnnnnnnnnnnnnnnnnnnnnnnnnnnnnnnnnnnnnnnnnnnnnnnnnnnnnnnnnnnnnnnnnnnnnnnnnnnnnnnnnnnnnnnnnnnnnnnnnnnnnnnnnnnnnnnnnnnnnnnnnnnnnnnnnnnnnnnnnnnnnnnnnnnnnnnnnnnnnnnnnnnnnnnnnnnnnnnnnnnnnnnnnnnnnnnnnnnnnnnnnnnnnnnnnnnnnnnnnnnnnnnnnnnnnnnnnnnnnnnnnnnnnnnnnnnnnnnnnnnnnnnnnnnnnnnnnnnnnnnnnnnnnnnnnnnnnnnnnnnnnnnnnnnnnnnnnnnnnnnnnnnnnnnnnnnnnnnnnnnnnnnnnnnnnnnnnnnnnnnnnnnnnnnnnnnnnnnnnnnnnnnnnnnnnnnnnnnnnnnnnnnnnnnnnnnnnnnnnnnnnnnnnnnnnnnnnnnnnnnnnnnnnnnnnnnnnnnnnnnnnnnnnnnnnnnnnnnnnnnnnnnnnnnnnnnnnnnnnnnnnnnnnnnnnnnnnnnnnnnnnnnnnnnnnnnnnnnnnnnnnnnnnnnnnnnnnnnnnnnnnnnnnnnnnnnnnnnnnnnnnnnnnnnnnnnnnnnnnnnnnnnnnnnnnnnnnnnnnnnnnnnnnnnnnnnnnnnnnnnnnnnnnnnnnnnnnnnnnnnnnnnnnnnnnnnnnnnnnnnnnnnnnnnnnnnnnnnnnnnnnnnnnnnnnnnnnnnnnnnnnnnnnnnnnnnnnnnnnnnnnnnnnnnnnnnnnnnnnnnnnnnnnnnnnnnnnnnnnnnnnnnnnnnnnnnnnnnnnnnnnnnnnnnnnnnnnnnnnnnnnnnnnnnnnnnnnnnnnnnnnnnnnnnnnnnnnnnnnnnnnnnnnnnnnnnnnnnnnnnnnnnnnnnnnnnnnnnnnnnnnnnnnnnnnnnnnnnnnnnnnnnnnnnnnnnnnnnnnnnnnnnnnnnnnnnnnnnnnnnnnnnnnnnnnnnnnnnnnnnnnnnnnnnnnnnnnnnnnnnnnnnnnnnnnnnnnnnnnnnnnnnnnnnnnnnnnnnnnnnnnnnnnnnnnnnnnnnnnnnnnnnnnnnnnnnnnnnnnnnnnnnnnnnnnnnnnnnnnnnnnnnnnnnnnnnnnnnnnnnnnnnnnnnnnnnnnnnnnnnnnnnnnnnnnnnnnnnnnnnnnnnnnnnnnnnnnnnnnnnnnnnnnnnnnnnnnnnnnnnnnnnnnnnnnnnnnnnnnnnnnnnnnnnnnnnnnnnnnnnnnnnnnnnnnnnnnnnnnnnnnnnnnnnnnnnnnnnnnnnnnnnnnnnnnnnnnnnnnnnnnnnnnnnnnnnnnnnnnnnnnnnnnnnnnnnnnnnnnnnnnnnnnnnnnnnnnnnnnnnnnnnnnnnnnnnnnnnnnnnnnnnnnnnnnnnnnnnnnnnnnnnnnnnnnnnnnnnnnnnnnnnnnnnnnnnnnnnnnnnnnnnnnnnnnnnnnnnnnnnnnnnnnnnnnnnnnnnnnnnnnnnnnnnnnnnnnnnnnnnnnnnnnnnnnnnnnnnnnnnnnnnnnnnnnnnnnnnnnnnnnnnnnnnnnnnnnnnnnnnnnnnnnnnnnnnnnnnnnnnnnnnnnnnnnnnnnnnnnnnnnnnnnnnnnnnnnnnnnnnnnnnnnnnnnnnnnnnnnnnnnnnnnnnnnnnnnnnnnnnnnnnnnnnnnnnnnnnnnnnnnnnnnnnnnnnnnnnnnnnnnnnnnnnnnnnnnnnnnnnnnnnnnnnnnnnnnnnnnnnnnnnnnnnnnnnnnnnnnnnnnnnnnnnnnnnnnnnnnnnnnnnnnnnnnnnnnnnnnnnnnnnnnnnnnnnnnnnnnnnnnnnnnnnnnnnnnnnnnnnnnnnnnnnnnnnnnnnnnnnnnnnnnnnnnnnnnnnnnnnnnnnnnnnnnnnnnnnnnnnnnnnnnnnnnnnnnnnnnnnnnnnnnnnnnnnnnnnnnnnnnnnnnnnnnnnnnnnnnnnnnnnnnnnnnnnnnnnnnnnnnnnnnnnnnnnnnnnnnnnnnnnnnnnnnnnnnnnnnnnnnnnnnnnnnnnnnnnnnnnnnnnnnnnnnnnnnnnnnnnnnnnnnnnnnnnnnnnnnnnnnnnnnnnnnnnnnnnnnnnnnnnnnnnnnnnnnnnnnnnnnnnnnnnnnnnnnnnnnnnnnnnnnnnnnnnnnnnnnnnnnnnnnnnnnnnnnnnnnnnnnnnnnnnnnnnnnnnnnnnnnnnnnnnnnnnnnnnnnnnnnnnnnnnnnnnnnnnnnnnnnnnnnnnnnnnnnnnnnnnnnnnnnnnnnnnnnnnnnnnnnnnnnnnnnnnnnnnnnnnnnnnnnnnnnnnnnnnnnnnnnnnnnnnnnnnnnnnnnnnnnnnnnnnnnnnnnnnnnnnnnnnnnnnnnnnnnnnnnnnnnnnnnnnnnnnnnnnnnnnnnnnnnnnnnnnnnnnnnnnnnnnnnnnnnnnnnnnnnnnnnnnnnnnnnnnnnnnnnnnnnnnnnnnnnnnnnnnnnnnnnnnnnnnnnnnnnnnnnnnnnnnnnnnnnnnnnnnnnnnnnnnnnnnnnnnnnnnnnnnnnnnnnnnnnnnnnnnnnnnnnnnnnnnnnnnnnnnnnnnnnnnnnnnnnnnnnnnnnnnnnnnnnnnnnnnnnnnnnnnnnnnnnnnnnnnnnnnnnnnnnnnnnnnnnnnnnnnnnnnnnnnnnnnnnnnnnnnnnnnnnnnnnnnnnnnnnnnnnnnnnnnnnnnnnnnnnnnnnnnnnnnnnnnnnnnnnnnnnnnnnnnnnnnnnnnnnnnnnnnnnnnnnnnnnnnnnnnnnnnnnnnnnnnnnnnnnnnnnnnnnnnnnnnnnnnnnnnnnnnnnnnnnnnnnnnnnnnnnnnnnnnnnnnnnnnnnnnnnnnnnnnnnnnnnnnnnnnnnnnnnnnnnnnnnnnnnnnnnnnnnnnnnnnnnnnnnnnnnnnnnnnnnnnnnnnnnnnnnnnnnnnnnnnnnnnnnnnnnnnnnnnnnnnnnnnnnnnnnnnnnnnnnnnnnnnnnnnnnnnnnnnnnnnnnnnnnnnnnnnnnnnnnnnnnnnnnnnnnnnnnnnnnnnnnnnnnnnnnnnnnnnnnnnnnnnnnnnnnnnnnnnnnnnnnnnnnnnnnnnnnnnnnnnnnnnnnnnnnnnnnnnnnnnnnnnnnnnnnnnnnnnnnnnnnnnnnnnnnnnnnnnnnnnnnnnnnnnnnnnnnnnnnnnnnnnnnnnnnnnnnnnnnnnnnnnnnnnnnnnnnnnnnnnnnnnnnnnnnnnnnnnnnnnnnnnnnnnnnnnnnnnnnnnnnnnnnnnnnnnnnnnnnnnnnnnnnnnnnnnnnnnnnnnnnnnnnnnnnnnnnnnnnnnnnnnnnnnnnnnnnnnnnnnnnnnnnnnnnnnnnnnnnnnnnnnnnnnnnnnnnnnnnnnnnnnnnnnnnnnnnnnnnnnnnnnnnnnnnnnnnnnnnnnnnnnnnnnnnnnnnnnnnnnnnnnnnnnnnnnnnnnnnnnnnnnnnnnnnnnnnnnnnnnnnnnnnnnnnnnnnnnnnnnnnnnnnnnnnnnnnnnnnnnnnnnnnnnnnnnnnnnnnnnnnnnnnnnnnnnnnnnnnnnnnnnnnnnnnnnnnnnnnnnnnnnnnnnnnnnnnnnnnnnnnnnnnnnnnnnnnnnnnnnnnnnnnnnnnnnnnnnnnnnnnnnnnnnnnnnnnnnnnnnnnnnnnnnnnnnnnnnnnnnnnnnnnnnnnnnnnnnnnnnnnnnnnnnnnnnnnnnnnnnnnnnnnnnnnnnnnnnnnnnnnnnnnnnnnnnnnnnnnnnnnnnnnnnnnnnnnnnnnnnnnnnnnnnnnnnnnnnnnnnnnnnnnnnnnnnnnnnnnnnnnnnnnnnnnnnnnnnnnnnnnnnnnnnnnnnnnnnnnnnnnnnnnnnnnnnnnnnnnnnnnnnnnnnnnnnnnnnnnnnnnnnnnnnnnnnnnnnnnnnnnnnnnnnnnnnnnnnnnnnnnnnnnnnnnnnnnnnnnnnnnnnnnnnnnnnnnnnnnnnnnnnnnnnnnnnnnnnnnnnnnnnnnnnnnnnnnnnnnnnnnnnnnnnnnnnnnnnnnnnnnnnnnnnnnnnnnnnnnnnnnnnnnnnnnnnnnnnnnnnnnnnnnnnnnnnnnnnnnnnnnnnnnnnnnnnnnnnnnnnnnnnnnnnnnnnnnnnnnnnnnnnnnnnnnnnnnnnnnnnnnnnnnnnnnnnnnnnnnnnnnnnnnnnnnnnnnnnnnnnnnnnnnnnnnnnnnnnnnnnnnnnnnnnnnnnnnnnnnnnnnnnnnnnnnnnnnnnnnnnnnnnnnnnnnnnnnnnnnnnnnnnnnnnnnnnnnnnnnnnnnnnnnnnnnnnnnnnnnnnnnnnnnnnnnnnnnnnnnnnnnnnnnnnnnnnnnnnnnnnnnnnnnnnnnnnnnnnnnnnnnnnnnnnnnnnnnnnnnnnnnnnnnnnnnnnnnnnnnnnnnnnnnnnnnnnnnnnnnnnnnnnnnnnnnnnnnnnnnnnnnnnnnnnnnnnnnnnnnnnnnnnnnnnnnnnnnnnnnnnnnnnnnnnnnnnnnnnnnnnnnnnnnnnnnnnnnnnnnnnnnnnnnnnnnnnnnnnnnnnnnnnnnnnnnnnnnnnnnnnnnnnnnnnnnnnnnnnnnnnnnnnnnnnnnnnnnnnnnnnnnnnnnnnnnnnnnnnnnnnnnnnnnnnnnnnnnnnnnnnnnnnnnnnnnnnnnnnnnnnnnnnnnnnnnnnnnnnnnnnnnnnnnnnnnnnnnnnnnnnnnnnnnnnnnnnnnnnnnnnnnnnnnnnnnnnnnnnnnnnnnnnnnnnnnnnnnnnnnnnnnnnnnnnnnnnnnnnnnnnnnnnnnnnnnnnnnnnnnnnnnnnnnnnnnnnnnnnnnnnnnnnnnnnnnnnnnnnnnnnnnnnnnnnnnnnnnnnnnnnnnnnnnnnnnnnnnnnnnnnnnnnnnnnnnnnnnnnnnnnnnnnnnnnnnnnnnnnnnnnnnnnnnnnnnnnnnnnnnnnnnnnnnnnnnnnnnnnnnnnnnnnnnnnnnnnnnnnnnnnnnnnnnnnnnnnnnnnnnnnnnnnnnnnnnnnnnnnnnnnnnnnnnnnnnnnnnnnnnnnnnnnnnnnnnnnnnnnnnnnnnnnnnnnnnnnnnnnnnnnnnnnnnnnnnnnnnnnnnnnnnnnnnnnnnnnnnnnnnnnnnnnnnnnnnnnnnnnnnnnnnnnnnnnnnnnnnnnnnnnnnnnnnnnnnnnnnnnnnnnnnnnnnnnnnnnnnnnnnnnnnnnnnnnnnnnnnnnnnnnnnnnnnnnnnnnnnnnnnnnnnnnnnnnnnnnnnnnnnnnnnnnnnnnnnnnnnnnnnnnnnnnnnnnnnnnnnnnnnnnnnnnnnnnnnnnnnnnnnnnnnnnnnnnnnnnnnnnnnnnnnnnnnnnnnnnnnnnnnnnnnnnnnnnnnnnnnnnnnnnnnnnnnnnnnnnnnnnnnnnnnnnnnnnnnnnnnnnnnnnnnnnnnnnnnnnnnnnnnnnnnnnnnnnnnnnnnnnnnnnnnnnnnnnnnnnnnnnnnnnnnnnnnnnnnnnnnnnnnnnnnnnnnnnnnnnnnnnnnnnnnnnnnnnnnnnnnnnnnnnnnnnnnnnnnnnnnnnnnnnnnnnnnnnnnnnnnnnnnnnnnnnnnnnnnnnnnnnnnnnnnnnnnnnnnnnnnnnnnnnnnnnnnnnnnnnnnnnnnnnnnnnnnnnnnnnnnnnnnnnnnnnnnnnnnnnnnnnnnnnnnnnnnnnnnnnnnnnnnnnnnnnnnnnnnnnnnnnnnnnnnnnnnnnnnnnnnnnnnnnnnnnnnnnnnnnnnnnnnnnnnnnnnnnnnnnnnnnnnnnnnnnnnnnnnnnnnnnnnnnnnnnnnnnnnnnnnnnnnnnnnnnnnnnnnnnnnnnnnnnnnnnnnnnnnnnnnnnnnnnnnnnnnnnnnnnnnnnnnnnnnnnnnnnnnnnnnnnnnnnnnnnnnnnnnnnnnnnnnnnnnnnnnnnnnnnnnnnnnnnnnnnnnnnnnnnnnnnnnnnnnnnnnnnnnnnnnnnnnnnnnnnnnnnnnnnnnnnnnnnnnnnnnnnnnnnnnnnnnnnnnnnnnnnnnnnnnnnnnnnnnnnnnnnnnnnnnnnnnnnnnnnnnnnnnnnnnnnnnnnnnnnnnnnnnnnnnnnnnnnnnnnnnnnnnnnnnnnnnnnnnnnnnnnnnnnnnnnnnnnnnnnnnnnnnnnnnnnnnnnnnnnnnnnnnnnnnnnnnnnnnnnnnnnnnnnnnnnnnnnnnnnnnnnnnnnnnnnnnnnnnnnnnnnnnnnnnnnnnnnnnnnnnnnnnnnnnnnnnnnnnnnnnnnnnnnnnnnnnnnnnnnnnnnnnnnnnnnnnnnnnnnnnnnnnnnnnnnnnnnnnnnnnnnnnnnnnnnnnnnnnnnnnnnnnnnnnnnnnnnnnnnnnnnnnnnnnnnnnnnnnnnnnnnnnnnnnnnnnnnnnnnnnnnnnnnnnnnnnnnnnnnnnnnnnnnnnnnnnnnnnnnnnnnnnnnnnnnnnnnnnnnnnnnnnnnnnnnnnnnnnnnnnnnnnnnnnnnnnnnnnnnnnnnnnnnnnnnnnnnnnnnnnnnnnnnnnnnnnnnnnnnnnnnnnnnnnnnnnnnnnnnnnnnnnnnnnnnnnnnnnnnnnnnnnnnnnnnnnnnnnnnnnnnnnnnnnnnnnnnnnnnnnnnnnnnnnnnnnnnnnnnnnnnnnnnnnnnnnnnnnnnnnnnnnnnnnnnnnnnnnnnnnnnnnnnnnnnnnnnnnnnnnnnnnnnnnnnnnnnnnnnnnnnnnnnnnnnnnnnnnnnnnnnnnnnnnnnnnnnnnnnnnnnnnnnnnnnnnnnnnnnnnnnnnnnnnnnnnnnnnnnnnnnnnnnnnnnnnnnnnnnnnnnnnnnnnnnnnnnnnnnnnnnnnnnnnnnnnnnnnnnnnnnnnnnnnnnnnnnnnnnnnnnnnnnnnnnnnnnnnnnnnnnnnnnnnnnnnnnnnnnnnnnnnnnnnnnnnnnnnnnnnnnnnnnnnnnnnnnnnnnnnnnnnnnnnnnnnnnnnnnnnnnnnnnnnnnnnnnnnnnnnnnnnnnnnnnnnnnnnnnnnnnnnnnnnnnnnnnnnnnnnnnnnnnnnnnnnnnnnnnnnnnnnnnnnnnnnnnnnnnnnnnnnnnnnnnnnnnnnnnnnnnnnnnnnnnnnnnnnnnnnnnnnnnnnnnnnnnnnnnnnnnnnnnnnnnnnnnnnnnnnnnnnnnnnnnnnnnnnnnnnnnnnnnnnnnnnnnnnnnnnnnnnnnnnnnnnnnnnnnnnnnnnnnnnnnnnnnnnnnnnnnnnnnnnnnnnnnnnnnnnnnnnnnnnnnnnnnnnnnnnnnnnnnnnnnnnnnnnnnnnnnnnnnnnnnnnnnnnnnnnnnnnnnnnnnnnnnnnnnnnnnnnnnnnnnnnnnnnnnnnnnnnnnnnnnnnnnnnnnnnnnnnnnnnnnnnnnnnnnnnnnnnnnnnnnnnnnnnnnnnnnnnnnnnnnnnnnnnnnnnnnnnnnnnnnnnnnnnnnnnnnnnnnnnnnnnnnnnnnnnnnnnnnnnnnnnnnnnnnnnnnnnnnnnnnnnnnnnnnnnnnnnnnnnnnnnnnnnnnnnnnnnnnnnnnnnnnnnnnnnnnnnnnnnnnnnnnnnnnnnnnnnnnnnnnnnnnnnnnnnnnnnnnnnnnnnnnnnnnnnnnnnnnnnnnnnnnnnnnnnnnnnnnnnnnnnnnnnnnnnnnnnnnnnnnnnnnnnnnnnnnnnnnnnnnnnnnnnnnnnnnnnnnnnnnnnnnnnnnnnnnnnnnnnnnnnnnnnnnnnnnnnnnnnnnnnnnnnnnnnnnnnnnnnnnnnnnnnnnnnnnnnnnnnnnnnnnnnnnnnnnnnnnnnnnnnnnnnnnnnnnnnnnnnnnnnnnnnnnnnnnnnnnnnnnnnnnnnnnnnnnnnnnnnnnnnnnnnnnnnnnnnnnnnnnnnnnnnnnnnnnnnnnnnnnnnnnnnnnnnnnnnnnnnnnnnnnnnnnnnnnnnnnnnnnnnnnnnnnnnnnnnnnnnnnnnnnnnnnnnnnnnnnnnnnnnnnnnnnnnnnnnnnnnnnnnnnnnnnnnnnnnnnnnnnnnnnnnnnnnnnnnnnnnnnnnnnnnnnnnnnnnnnnnnnnnnnnnnnnnnnnnnnnnnnnnnnnnnnnnnnnnnnnnnnnnnnnnnnnnnnnnnnnnnnnnnnnnnnnnnnnnnnnnnnnnnnnnnnnnnnnnnnnnnnnnnnnnnnnnnnnnnnnnnnnnnnnnnnnnnnnnnnnnnnnnnnnnnnnnnnnnnnnnnnnnnnnnnnnnnnnnnnnnnnnnnnnnnnnnnnnnnnnnnnnnnnnnnnnnnnnnnnnnnnnnnnnnnnnnnnnnnnnnnnnnnnnnnnnnnnnnnnnnnnnnnnnnnnnnnnnnnnnnnnnnnnnnnnnnnnnnnnnnnnnnnnnnnnnnnnnnnnnnnnnnnnnnnnnnnnnnnnnnnnnnnnnnnnnnnnnnnnnnnnnnnnnnnnnnnnnnnnnnnnnnnnnnnnnnnnnnnnnnnnnnnnnnnnnnnnnnnnnnnnnnnnnnnnnnnnnnnnnnnnnnnnnnnnnnnnnnnnnnnnnnnnnnnnnnnnnnnnnnnnnnnnnnnnnnnnnnnnnnnnnnnnnnnnnnnnnnnnnnnnnnnnnnnnnnnnnnnnnnnnnnnnnnnnnnnnnnnnnnnnnnnnnnnnnnnnnnnnnnnnnnnnnnnnnnnnnnnnnnnnnnnnnnnnnnnnnnnnnnnnnnnnnnnnnnnnnnnnnnnnnnnnnnnnnnnnnnnnnnnnnnnnnnnnnnnnnnnnnnnnnnnnnnnnnnnnnnnnnnnnnnnnnnnnnnnnnnnnnnnnnnnnnnnnnnnnnnnnnnnnnnnnnnnnnnnnnnnnnnnnnnnnnnnnnnnnnnnnnnnnnnnnnnnnnnnnnnnnnnnnnnnnnnnnnnnnnnnnnnnnnnnnnnnnnnnnnnnnnnnnnnnnnnnnnnnnnnnnnnnnnnnnnnnnnnnnnnnnnnnnnnnnnnnnnnnnnnnnnnnnnnnnnnnnnnnnnnnnnnnnnnnnnnnnnnnnnnnnnnnnnnnnnnnnnnnnnnnnnnnnnnnnnnnnnnnnnnnnnnnnnnnnnnnnnnnnnnnnnnnnnnnnnnnnnnnnnnnnnnnnnnnnnnnnnnnnnnnnnnnnnnnnnnnnnnnnnnnnnnnnnnnnnnnnnnnnnnnnnnnnnnnnnnnnnnnnnnnnnnnnnnnnnnnnnnnnnnnnnnnnnnnnnnnnnnnnnnnnnnnnnnnnnnnnnnnnnnnnnnnnnnnnnnnnnnnnnnnnnnnnnnnnnnnnnnnnnnnnnnnnnnnnnnnnnnnnnnnnnnnnnnnnnnnnnnnnnnnnnnnnnnnnnnnnnnnnnnnnnnnnnnnnnnnnnnnnnnnnnnnnnnnnnnnnnnnnnnnnnnnnnnnnnnnnnnnnnnnnnnnnnnnnnnnnnnnnnnnnnnnnnnnnnnnnnnnnnnnnnnnnnnnnnnnnnnnnnnnnnnnnnnnnnnnnnnnnnnnnnnnnnnnnnnnnnnnnnnnnnnnnnnnnnnnnnnnnnnnnnnnnnnnnnnnnnnnnnnnnnnnnnnnnnnnnnnnnnnnnnnnnnnnnnnnnnnnnnnnnnnnnnnnnnnnnnnnnnnnnnnnnnnnnnnnnnnnnnnnnnnnnnnnnnnnnnnnnnnnnnnnnnnnnnnnnnnnnnnnnnnnnnnnnnnnnnnnnnnnnnnnnnnnnnnnnnnnnnnnnnnnnnnnnnnnnnnnnnnnnnnnnnnnnnnnnnnnnnnnnnnnnnnnnnnnnnnnnnnnnnnnnnnnnnnnnnnnnnnnnnnnnnnnnnnnnnnnnnnnnnnnnnnnnnnnnnnnnnnnnnnnnnnnnnnnnnnnnnnnnnnnnnnnnnnnnnnnnnnnnnnnnnnnnnnnnnnnnnnnnnnnnnnnnnnnnnnnnnnnnnnnnnnnnnnnnnnnnnnnnnnnnnnnnnnnnnnnnnnnnnnnnnnnnnnnnnnnnnnnnnnnnnnnnnnnnnnnnnnnnnnnnnnnnnnnnnnnnnnnnnnnnnnnnnnnnnnnnnnnnnnnnnnnnnnnnnnnnnnnnnnnnnnnnnnnnnnnnnnnnnnnnnnnnnnnnnnnnnnnnnnnnnnnnnnnnnnnnnnnnnnnnnnnnnnnnnnnnnnnnnnnnnnnnnnnnnnnnnnnnnnnnnnnnnnnnnnnnnnnnnnnnnnnnnnnnnnnnnnnnnnnnnnnnnnnnnnnnnnnnnnnnnnnnnnnnnnnnnnnnnnnnnnnnnnnnnnnnnnnnnnnnnnnnnnnnnnnnnnnnnnnnnnnnnnnnnnnnnnnnnnnnnnnnnnnnnnnnnnnnnnnnnnnnnnnnnnnnnnnnnnnnnnnnnnnnnnnnnnnnnnnnnnnnnnnnnnnnnnnnnnnnnnnnnnnnnnnnnnnnnnnnnnnnnnnnnnnnnnnnnnnnnnnnnnnnnnnnnnnnnnnnnnnnnnnnnnnnnnnnnnnnnnnnnnnnnnnnnnnnnnnnnnnnnnnnnnnnnnnnnnnnnnnnnnnnnnnnnnnnnnnnnnnnnnnnnnnnnnnnnnnnnnnnnnnnnnnnnnnnnnnnnnnnnnnnnnnnnnnnnnnnnnnnnnnnnnnnnnnnnnnnnnnnnnnnnnnnnnnnnnnnnnnnnnnnnnnnnnnnnnnnnnnnnnnnnnnnnnnnnnnnnnnnnnnnnnnnnnnnnnnnnnnnnnnnnnnnnnnnnnnnnnnnnnnnnnnnnnnnnnnnnnnnnnnnnnnnnnnnnnnnnnnnnnnnnnnnnnnnnnnnnnnnnnnnnnnnnnnnnnnnnnnnnnnnnnnnnnnnnnnnnnnnnnnnnnnnnnnnnnnnnnnnnnnnnnnnnnnnnnnnnnnnnnnnnnnnnnnnnnnnnnnnnnnnnnnnnnnnnnnnnnnnnnnnnnnnnnnnnnnnnnnnnnnnnnnnnnnnnnnnnnnnnnnnnnnnnnnnnnnnnnnnnnnnnnnnnnnnnnnnnnnnnnnnnnnnnnnnnnnnnnnnnnnnnnnnnnnnnnnnnnnnnnnnnnnnnnnnnnnnnnnnnnnnnnnnnnnnnnnnnnnnnnnnnnnnnnnnnnnnnnnnnnnnnnnnnnnnnnnnnnnnnnnnnnnnnnnnnnnnnnnnnnnnnnnnnnnnnnnnnnnnnnnnnnnnnnnnnnnnnnnnnnnnnnnnnnnnnnnnnnnnnnnnnnnnnnnnnnnnnnnnnnnnnnnnnnnnnnnnnnnnnnnnnnnnnnnnnnnnnnnnnnnnnnnnnnnnnnnnnnnnnnnnnnnnnnnnnnnnnnnnnnnnnnnnnnnnnnnnnnnnnnnnnnnnnnnnnnnnnnnnnnnnnnnnnnnnnnnnnnnnnnnnnnnnnnnnnnnnnnnnnnnnnnnnnnnnnnnnnnnnnnnnnnnnnnnnnnnnnnnnnnnnnnnnnnnnnnnnnnnnnnnnnnnnnnnnnnnnnnnnnnnnnnnnnnnnnnnnnnnnnnnnnnnnnnnnnnnnnnnnnnnnnnnnnnnnnnnnnnnnnnnnnnnnnnnnnnnnnnnnnnnnnnnnnnnnnnnnnnnnnnnnnnnnnnnnnnnnnnnnnnnnnnnnnnnnnnnnnnnnnnnnnnnnnnnnnnnnnnnnnnnnnnnnnnnnnnnnnnnnnnnnnnnnnnnnnnnnnnnnnnnnnnnnnnnnnnnnnnnnnnnnnnnnnnnnnnnnnnnnnnnnnnnnnnnnnnnnnnnnnnnnnnnnnnnnnnnnnnnnnnnnnnnnnnnnnnnnnnnnnnnnnnnnnnnnnnnnnnnnnnnnnnnnnnnnnnnnnnnnnnnnnnnnnnnnnnnnnnnnnnnnnnnnnnnnnnnnnnnnnnnnnnnnnnnnnnnnnnnnnnnnnnnnnnnnnnnnnnnnnnnnnnnnnnnnnnnnnnnnnnnnnnnnnnnnnnnnnnnnnnnnnnnnnnnnnnnnnnnnnnnnnnnnnnnnnnnnnnnnnnnnnnnnnnnnnnnnnnnnnnnnnnnnnnnnnnnnnnnnnnnnnnnnnnnnnnnnnnnnnnnnnnnnnnnnnnnnnnnnnnnnnnnnnnnnnnnnnnnnnnnnnnnnnnnnnnnnnnnnnnnnnnnnnnnnnnnnnnnnnnnnnnnnnnnnnnnnnnnnnnnnnnnnnnnnnnnnnnnnnnnnnnnnnnnnnnnnnnnnnnnnnnnnnnnnnnnnnnnnnnnnnnnnnnnnnnnnnnnnnnnnnnnnnnnnnnnnnnnnnnnnnnnnnnnnnnnnnnnnnnnnnnnnnnnnnnnnnnnnnnnnnnnnnnnnnnnnnnnnnnnnnnnnnnnnnnnnnnnnnnnnnnnnnnnnnnnnnnnnnnnnnnnnnnnnnnnnnnnnnnnnnnnnnnnnnnnnnnnnnnnnnnnnnnnnnnnnnnnnnnnnnnnnnnnnnnnnnnnnnnnnnnnnnnnnnnnnnnnnnnnnnnnnnnnnnnnnnnnnnnnnnnnnnnnnnnnnnnnnnnnnnnnnnnnnnnnnnnnnnnnnnnnnnnnnnnnnnnnnnnnnnnnnnnnnnnnnnnnnnnnnnnnnnnnnnnnnnnnnnnnnnnnnnnnnnnnnnnnnnnnnnnnnnnnnnnnnnnnnnnnnnnnnnnnnnnnnnnnnnnnnnnnnnnnnnnnnnnnnnnnnnnnnnnnnnnnnnnnnnnnnnnnnnnnnnnnnnnnnnnnnnnnnnnnnnnnnnnnnnnnnnnnnnnnnnnnnnnnnnnnnnnnnnnnnnnnnnnnnnnnnnnnnnnnnnnnnnnnnnnnnnnnnnnnnnnnnnnnnnnnnnnnnnnnnnnnnnnnnnnnnnnnnnnnnnnnnnnnnnnnnnnnnnnnnnnnnnnnnnnnnnnnnnnnnnnnnnnnnnnnnnnnnnnnnnnnnnnnnnnnnnnnnnnnnnnnnnnnnnnnnnnnnnnnnnnnnnnnnnnnnnnnnnnnnnnnnnnnnnnnnnnnnnnnnnnnnnnnnnnnnnnnnnnnnnnnnnnnnnnnnnnnnnnnnnnnnnnnnnnnnnnnnnnnnnnnnnnnnnnnnnnnnnnnnnnnnnnnnnnnnnnnnnnnnnnnnnnnnnnnnnnnnnnnnnnnnnnnnnnnnnnnnnnnnnnnnnnnnnnnnnnnnnnnnnnnnnnnnnnnnnnnnnnnnnnnnnnnnnnnnnnnnnnnnnnnnnnnnnnnnnnnnnnnnnnnnnnnnnnnnnnnnnnnnnnnnnnnnnnnnnnnnnnnnnnnnnnnnnnnnnnnnnnnnnnnnnnnnnnnnnnnnnnnnnnnnnnnnnnnnnnnnnnnnnnnnnnnnnnnnnnnnnnnnnnnnnnnnnnnnnnnnnnnnnnnnnnnnnnnnnnnnnnnnnnnnnnnnnnnnnnnnnnnnnnnnnnnnnnnnnnnnnnnnnnnnnnnnnnnnnnnnnnnnnnnnnnnnnnnnnnnnnnnnnnnnnnnnnnnnnnnnnnnnnnnnnnnnnnnnnnnnnnnnnnnnnnnnnnnnnnnnnnnnnnnnnnnnnnnnnnnnnnnnnnnnnnnnnnnnnnnnnnnnnnnnnnnnnnnnnnnnnnnnnnnnnnnnnnnnnnnnnnnnnnnnnnnnnnnnnnnnnnnnnnnnnnnnnnnnnnnnnnnnnnnnnnnnnnnnnnnnnnnnnnnnnnnnnnnnnnnnnnnnnnnnnnnnnnnnnnnnnnnnnnnnnnnnnnnnnnnnnnnnnnnnnnnnnnnnnnnnnnnnnnnnnnnnnnnnnnnnnnnnnnnnnnnnnnnnnnnnnnnnnnnnnnnnnnnnnnnnnnnnnnnnnnnnnnnnnnnnnnnnnnnnnnnnnnnnnnnnnnnnnnnnnnnnnnnnnnnnnnnnnnnnnnnnnnnnnnnnnnnnnnnnnnnnnnnnnnnnnnnnnnnnnnnnnnnnnnnnnnnnnnnnnnnnnnnnnnnnnnnnnnnnnnnnnnnnnnnnnnnnnnnnnnnnnnnnnnnnnnnnnnnnnnnnnnnnnnnnnnnnnnnnnnnnnnnnnnnnnnnnnnnnnnnnnnnnnnnnnnnnnnnnnnnnnnnnnnnnnnnnnnnnnnnnnnnnnnnnnnnnnnnnnnnnnnnnnnnnnnnnnnnnnnnnnnnnnnnnnnnnnnnnnnnnnnnnnnnnnnnnnnnnnnnnnnnnnnnnnnnnnnnnnnnnnnnnnnnnnnnnnnnnnnnnnnnnnnnnnnnnnnnnnnnnnnnnnnnnnnnnnnnnnnnnnnnnnnnnnnnnnnnnnnnnnnnnnnnnnnnnnnnnnnnnnnnnnnnnnnnnnnnnnnnnnnnnnnnnnnnnnnnnnnnnnnnnnnnnnnnnnnnnnnnnnnnnnnnnnnnnnnnnnnnnnnnnnnnnnnnnnnnnnnnnnnnnnnnnnnnnnnnnnnnnnnnnnnnnnnnnnnnnnnnnnnnnnnnnnnnnnnnnnnnnnnnnnnnnnnnnnnnnnnnnnnnnnnnnnnnnnnnnnnnnnnnnnnnnnnnnnnnnnnnnnnnnnnnnnnnnnnnnnnnnnnnnnnnnnnnnnnnnnnnnnnnnnnnnnnnnnnnnnnnnnnnnnnnnnnnnnnnnnnnnnnnnnnnnnnnnnnnnnnnnnnnnnnnnnnnnnnnnnnnnnnnnnnnnnnnnnnnnnnnnnnnnnnnnnnnnnnnnnnnnnnnnnnnnnnnnnnnnnnnnnnnnnnnnnnnnnnnnnnnnnnnnnnnnnnnnnnnnnnnnnnnnnnnnnnnnnnnnnnnnnnnnnnnnnnnnnnnnnnnnnnnnnnnnnnnnnnnnnnnnnnnnnnnnnnnnnnnnnnnnnnnnnnnnnnnnnnnnnnnnnnnnnnnnnnnnnnnnnnnnnnnnnnnnnnnnnnnnnnnnnnnnnnnnnnnnnnnnnnnnnnnnnnnnnnnnnnnnnnnnnnnnnnnnnnnnnnnnnnnnnnnnnnnnnnnnnnnnnnnnnnnnnnnnnnnnnnnnnnnnnnnnnnnnnnnnnnnnnnnnnnnnnnnnnnnnnnnnnnnnnnnnnnnnnnnnnnnnnnnnnnnnnnnnnnnnnnnnnnnnnnnnnnnnnnnnnnnnnnnnnnnnnnnnnnnnnnnnnnnnnnnnnnnnnnnnnnnnnnnnnnnnnnnnnnnnnnnnnnnnnnnnnnnnnnnnnnnnnnnnnnnnnnnnnnnnnnnnnnnnnnnnnnnnnnnnnnnnnnnnnnnnnnnnnnnnnnnnnnnnnnnnnnnnnnnnnnnnnnnnnnnnnnnnnnnnnnnnnnnnnnnnnnnnnnnnnnnnnnnnnnnnnnnnnnnnnnnnnnnnnnnnnnnnnnnnnnnnnnnnnnnnnnnnnnnnnnnnnnnnnnnnnnnnnnnnnnnnnnnnnnnnnnnnnnnnnnnnnnnnnnnnnnnnnnnnnnnnnnnnnnnnnnnnnnnnnnnnnnnnnnnnnnnnnnnnnnnnnnnnnnnnnnnnnnnnnnnnnnnnnnnnnnnnnnnnnnnnnnnnnnnnnnnnnnnnnnnnnnnnnnnnnnnnnnnnnnnnnnnnnnnnnnnnnnnnnnnnnnnnnnnnnnnnnnnnnnnnnnnnnnnnnnnnnnnnnnnnnnnnnnnnnnnnnnnnnnnnnnnnnnnnnnnnnnnnnnnnnnnnnnnnnnnnnnnnnnnnnnnnnnnnnnnnnnnnnnnnnnnnnnnnnnnnnnnnnnnnnnnnnnnnnnnnnnnnnnnnnnnnnnnnnnnnnnnnnnnnnnnnnnnnnnnnnnnnnnnnnnnnnnnnnnnnnnnnnnnnnnnnnnnnnnnnnnnnnnnnnnnnnnnnnnnnnnnnnnnnnnnnnnnnnnnnnnnnnnnnnnnnnnnnnnnnnnnnnnnnnnnnnnnnnnnnnnnnnnnnnnnnnnnnnnnnnnnnnnnnnnnnnnnnnnnnnnnnnnnnnnnnnnnnnnnnnnnnnnnnnnnnnnnnnnnnnnnnnnnnnnnnnnnnnnnnnnnnnnnnnnnnnnnnnnnnnnnnnnnnnnnnnnnnnnnnnnnnnnnnnnnnnnnnnnnnnnnnnnnnnnnnnnnnnnnnnnnnnnnnnnnnnnnnnnnnnnnnnnnnnnnnnnnnnnnnnnnnnnnnnnnnnnnnnnnnnnnnnnnnnnnnnnnnnnnnnnnnnnnnnnnnnnnnnnnnnnnnnnnnnnnnnnnnnnnnnnnnnnnnnnnnnnnnnnnnnnnnnnnnnnnnnnnnnnnnnnnnnnnnnnnnnnnnnnnnnnnnnnnnnnnnnnnnnnnnnnnnnnnnnnnnnnnnnnnnnnnnnnnnnnnnnnnnnnnnnnnnnnnnnnnnnnnnnnnnnnnnnnnnnnnnnnnnnnnnnnnnnnnnnnnnnnnnnnnnnnnnnnnnnnnnnnnnnnnnnnnnnnnnnnnnnnnnnnnnnnnnnnnnnnnnnnnnnnnnnnnnnnnnnnnnnnnnnnnnnnnnnnnnnnnnnnnnnnnnnnnnnnnnnnnnnnnnnnnnnnnnnnnnnnnnnnnnnnnnnnnnnnnnnnnnnnnnnnnnnnnnnnnnnnnnnnnnnnnnnnnnnnnnnnnnnnnnnnnnnnnnnnnnnnnnnnnnnnnnnnnnnnnnnnnnnnnnnnnnnnnnnnnnnnnnnnnnnnnnnnnnnnnnnnnnnnnnnnnnnnnnnnnnnnnnnnnnnnnnnnnnnnnnnnnnnnnnnnnnnnnnnnnnnnnnnnnnnnnnnnnnnnnnnnnnnnnnnnnnnnnnnnnnnnnnnnnnnnnnnnnnnnnnnnnnnnnnnnnnnnnnnnnnnnnnnnnnnnnnnnnnnnnnnnnnnnnnnnnnnnnnnnnnnnnnnnnnnnnnnnnnnnnnnnnnnnnnnnnnnnnnnnnnnnnnnnnnnnnnnnnnnnnnnnnnnnnnnnnnnnnnnnnnnnnnnnnnnnnnnnnnnnnnnnnnnnnnnnnnnnnnnnnnnnnnnnnnnnnnnnnnnnnnnnnnnnnnnnnnnnnnnnnnnnnnnnnnnnnnnnnnnnnnnnnnnnnnnnnnnnnnnnnnnnnnnnnnnnnnnnnnnnnnnnnnnnnnnnnnnnnnnnnnnnnnnnnnnnnnnnnnnnnnnnnnnnnnnnnnnnnnnnnnnnnnnnnnnnnnnnnnnnnnnnnnnnnnnnnnnnnnnnnnnnnnnnnnnnnnnnnnnnnnnnnnnnnnnnnnnnnnnnnnnnnnnnnnnnnnnnnnnnnnnnnnnnnnnnnnnnnnnnnnnnnnnnnnnnnnnnnnnnnnnnnnnnnnnnnnnnnnnnnnnnnnnnnnnnnnnnnnnnnnnnnnnnnnnnnnnnnnnnnnnnnnnnnnnnnnnnnnnnnnnnnnnnnnnnnnnnnnnnnnnnnnnnnnnnnnnnnnnnnnnnnnnnnnnnnnnnnnnnnnnnnnnnnnnnnnnnnnnnnnnnnnnnnnnnnnnnnnnnnnnnnnnnnnnnnnnnnnnnnnnnnnnnnnnnnnnnnnnnnnnnnnnnnnnnnnnnnnnnnnnnnnnnnnnnnnnnnnnnnnnnnnnnnnnnnnnnnnnnnnnnnnnnnnnnnnnnnnnnnnnnnnnnnnnnnnnnnnnnnnnnnnnnnnnnnnnnnnnnnnnnnnnnnnnnnnnnnnnnnnnnnnnnnnnnnnnnnnnnnnnnnnnnnnnnnnnnnnnnnnnnnnnnnnnnnnnnnnnnnnnnnnnnnnnnnnnnnnnnnnnnnnnnnnnnnnnnnnnnnnnnnnnnnnnnnnnnnnnnnnnnnnnnnnnnnnnnnnnnnnnnnnnnnnnnnnnnnnnnnnnnnnnnnnnnnnnnnnnnnnnnnnnnnnnnnnnnnnnnnnnnnnnnnnnnnnnnnnnnnnnnnnnnnnnnnnnnnnnnnnnnnnnnnnnnnnnnnnnnnnnnnnnnnnnnnnnnnnnnnnnnnnnnnnnnnnnnnnnnnnnnnnnnnnnnnnnnnnnnnnnnnnnnnnnnnnnnnnnnnnnnnnnnnnnnnnnnnnnnnnnnnnnnnnnnnnnnnnnnnnnnnnnnnnnnnnnnnnnnnnnnnnnnnnnnnnnnnnnnnnnnnnnnnnnnnnnnnnnnnnnnnnnnnnnnnnnnnnnnnnnnnnnnnnnnnnnnnnnnnnnnnnnnnnnnnnnnnnnnnnnnnnnnnnnnnnnnnnnnnnnnnnnnnnnnnnnnnnnnnnnnnnnnnnnnnnnnnnnnnnnnnnnnnnnnnnnnnnnnnnnnnnnnnnnnnnnnnnnnnnnnnnnnnnnnnnnnnnnnnnnnnnnnnnnnnnnnnnnnnnnnnnnnnnnnnnnnnnnnnnnnnnnnnnnnnnnnnnnnnnnnnnnnnnnnnnnnnnnnnnnnnnnnnnnnnnnnnnnnnnnnnnnnnnnnnnnnnnnnnnnnnnnnnnnnnnnnnnnnnnnnnnnnnnnnnnnnnnnnnnnnnnnnnnnnnnnnnnnnnnnnnnnnnnnnnnnnnnnnnnnnnnnnnnnnnnnnnnnnnnnnnnnnnnnnnnnnnnnnnnnnnnnnnnnnnnnnnnnnnnnnnnnnnnnnnnnnnnnnnnnnnnnnnnnnnnnnnnnnnnnnnnnnnnnnnnnnnnnnnnnnnnnnnnnnnnnnnnnnnnnnnnnnnnnnnnnnnnnnnnnnnnnnnnnnnnnnnnnnnnnnnnnnnnnnnnnnnnnnnnnnnnnnnnnnnnnnnnnnnnnnnnnnnnnnnnnnnnnnnnnnnnnnnnnnnnnnnnnnnnnnnnnnnnnnnnnnnnnnnnnnnnnnnnnnnnnnnnnnnnnnnnnnnnnnnnnnnnnnnnnnnnnnnnnnnnnnnnnnnnnnnnnnnnnnnnnnnnnnnnnnnnnnnnnnnnnnnnnnnnnnnnnnnnnnnnnnnnnnnnnnnnnnnnnnnnnnnnnnnnnnnnnnnnnnnnnnnnnnnnnnnnnnnnnnnnnnnnnnnnnnnnnnnnnnnnnnnnnnnnnnnnnnnnnnnnnnnnnnnnnnnnnnnnnnnnnnnnnnnnnnnnnnnnnnnnnnnnnnnnnnnnnnnnnnnnnnnnnnnnnnnnnnnnnnnnnnnnnnnnnnnnnnnnnnnnnnnnnnnnnnnnnnnnnnnnnnnnnnnnnnnnnnnnnnnnnnnnnnnnnnnnnnnnnnnnnnnnnnnnnnnnnnnnnnnnnnnnnnnnnnnnnnnnnnnnnnnnnnnnnnnnnnnnnnnnnnnnnnnnnnnnnnnnnnnnnnnnnnnnnnnnnnnnnnnnnnnnnnnnnnnnnnnnnnnnnnnnnnnnnnnnnnnnnnnnnnnnnnnnnnnnnnnnnnnnnnnnnnnnnnnnnnnnnnnnnnnnnnnnnnnnnnnnnnnnnnnnnnnnnnnnnnnnnnnnnnnnnnnnnnnnnnnnnnnnnnnnnnnnnnnnnnnnnnnnnnnnnnnnnnnnnnnnnnnnnnnnnnnnnnnnnnnnnnnnnnnnnnnnnnnnnnnnnnnnnnnnnnnnnnnnnnnnnnnnnnnnnnnnnnnnnnnnnnnnnnnnnnnnnnnnnnnnnnnnnnnnnnnnnnnnnnnnnnnnnnnnnnnnnnnnnnnnnnnnnnnnnnnnnnnnnnnnnnnnnnnnnnnnnnnnnnnnnnnnnnnnnnnnnnnnnnnnnnnnnnnnnnnnnnnnnnnnnnnnnnnnnnnnnnnnnnnnnnnnnnnnnnnnnnnnnnnnnnnnnnnnnnnnnnnnnnnnnnnnnnnnnnnnnnnnnnnnnnnnnnnnnnnnnnnnnnnnnnnnnnnnnnnnnnnnnnnnnnnnnnnnnnnnnnnnnnnnnnnnnnnnnnnnnnnnnnnnnnnnnnnnnnnnnnnnnnnnnnnnnnnnnnnnnnnnnnnnnnnnnnnnnnnnnnnnnnnnnnnnnnnnnnnnnnnnnnnnnnnnnnnnnnnnnnnnnnnnnnnnnnnnnnnnnnnnnnnnnnnnnnnnnnnnnnnnnnnnnnnnnnnnnnnnnnnnnnnnnnnnnnnnnnnnnnnnnnnnnnnnnnnnnnnnnnnnnnnnnnnnnnnnnnnnnnnnnnnnnnnnnnnnnnnnnnnnnnnnnnnnnnnnnnnnnnnnnnnnnnnnnnnnnnnnnnnnnnnnnnnnnnnnnnnnnnnnnnnnnnnnnnnnnnnnnnnnnnnnnnnnnnnnnnnnnnnnnnnnnnnnnnnnnnnnnnnnnnnnnnnnnnnnnnnnnnnnnnnnnnnnnnnnnnnnnnnnnnnnnnnnnnnnnnnnnnnnnnnnnnnnnnnnnnnnnnnnnnnnnnnnnnnnnnnnnnnnnnnnnnnnnnnnnnnnnnnnnnnnnnnnnnnnnnnnnnnnnnnnnnnnnnnnnnnnnnnnnnnnnnnnnnnnnnnnnnnnnnnnnnnnnnnnnnnnnnnnnnnnnnnnnnnnnnnnnnnnnnnnnnnnnnnnnnnnnnnnnnnnnnnnnnnnnnnnnnnnnnnnnnnnnnnnnnnnnnnnnnnnnnnnnnnnnnnnnnnnnnnnnnnnnnnnnnnnnnnnnnnnnnnnnnnnnnnnnnnnnnnnnnnnnnnnnnnnnnnnnnnnnnnnnnnnnnnnnnnnnnnnnnnnnnnnnnnnnnnnnnnnnnnnnnnnnnnnnnnnnnnnnnnnnnnnnnnnnnnnnnnnnnnnnnnnnnnnnnnnnnnnnnnnnnnnnnnnnnnnnnnnnnnnnnnnnnnnnnnnnnnnnnnnnnnnnnnnnnnnnnnnnnnnnnnnnnnnnnnnnnnnnnnnnnnnnnnnnnnnnnnnnnnnnnnnnnnnnnnnnnnnnnnnnnnnnnnnnnnnnnnnnnnnnnnnnnnnnnnnnnnnnnnnnnnnnnnnnnnnnnnnnnnnnnnnnnnnnnnnnnnnnnnnnnnnnnnnnnnnnnnnnnnnnnnnnnnnnnnnnnnnnnnnnnnnnnnnnnnnnnnnnnnnnnnnnnnnnnnnnnnnnnnnnnnnnnnnnnnnnnnnnnnnnnnnnnnnnnnnnnnnnnnnnnnnnnnnnnnnnnnnnnnnnnnnnnnnnnnnnnnnnnnnnnnnnnnnnnnnnnnnnnnnnnnnnnnnnnnnnnnnnnnnnnnnnnnnnnnnnnnnnnnnnnnnnnnnnnnnnnnnnnnnnnnnnnnnnnnnnnnnnnnnnnnnnnnnnnnnnnnnnnnnnnnnnnnnnnnnnnnnnnnnnnnnnnnnnnnnnnnnnnnnnnnnnnnnnnnnnnnnnnnnnnnnnnnnnnnnnnnnnnnnnnnnnnnnnnnnnnnnnnnnnnnnnnnnnnnnnnnnnnnnnnnnnnnnnnnnnnnnnnnnnnnnnnnnnnnnnnnnnnnnnnnnnnnnnnnnnnnnnnnnnnnnnnnnnnnnnnnnnnnnnnnnnnnnnnnnnnnnnnnnnnnnnnnnnnnnnnnnnnnnnnnnnnnnnnnnnnnnnnnnnnnnnnnnnnnnnnnnnnnnnnnnnnnnnnnnnnnnnnnnnnnnnnnnnnnnnnnnnnnnnnnnnnnnnnnnnnnnnnnnnnnnnnnnnnnnnnnnnnnnnnnnnnnnnnnnnnnnnnnnnnnnnnnnnnnnnnnnnnnnnnnnnnnnnnnnnnnnnnnnnnnnnnnnnnnnnnnnnnnnnnnnnnnnnnnnnnnnnnnnnnnnnnnnnnnnnnnnnnnnnnnnnnnnnnnnnnnnnnnnnnnnnnnnnnnnnnnnnnnnnnnnnnnnnnnnnnnnnnnnnnnnnnnnnnnnnnnnnnnnnnnnnnnnnnnnnnnnnnnnnnnnnnnnnnnnnnnnnnnnnnnnnnnnnnnnnnnnnnnnnnnnnnnnnnnnnnnnnnnnnnnnnnnnnnnnnnnnnnnnnnnnnnnnnnnnnnnnnnnnnnnnnnnnnnnnnnnnnnnnnnnnnnnnnnnnnnnnnnnnnnnnnnnnnnnnnnnnnnnnnnnnnnnnnnnnnnnnnnnnnnnnnnnnnnnnnnnnnnnnnnnnnnnnnnnnnnnnnnnnnnnnnnnnnnnnnnnnnnnnnnnnnnnnnnnnnnnnnnnnnnnnnnnnnnnnnnnnnnnnnnnnnnnnnnnnnnnnnnnnnnnnnnnnnnnnnnnnnnnnnnnnnnnnnnnnnnnnnnnnnnnnnnnnnnnnnnnnnnnnnnnnnnnnnnnnnnnnnnnnnnnnnnnnnnnnnnnnnnnnnnnnnnnnnnnnnnnnnnnnnnnnnnnnnnnnnnnnnnnnnnnnnnnnnnnnnnnnnnnnnnnnnnnnnnnnnnnnnnnnnnnnnnnnnnnnnnnnnnnnnnnnnnnnnnnnnnnnnnnnnnnnnnnnnnnnnnnnnnnnnnnnnnnnnnnnnnnnnnnnnnnnnnnnnnnnnnnnnnnnnnnnnnnnnnnnnnnnnnnnnnnnnnnnnnnnnnnnnnnnnnnnnnnnnnnnnnnnnnnnnnnnnnnnnnnnnnnnnnnnnnnnnnnnnnnnnnnnnnnnnnnnnnnnnnnnnnnnnnnnnnnnnnnnnnnnnnnnnnnnnnnnnnnnnnnnnnnnnnnnnnnnnnnnnnnnnnnnnnnnnnnnnnnnnnnnnnnnnnnnnnnnnnnnnnnnnnnnnnnnnnnnnnnnnnnnnnnnnnnnnnnnnnnnnnnnnnnnnnnnnnnnnnnnnnnnnnnnnnnnnnnnnnnnnnnnnnnnnnnnnnnnnnnnnnnnnnnnnnnnnnnnnnnnnnnnnnnnnnnnnnnnnnnnnnnnnnnnnnnnnnnnnnnnnnnnnnnnnnnnnnnnnnnnnnnnnnnnnnnnnnnnnnnnnnnnnnnnnnnnnnnnnnnnnnnnnnnnnnnnnnnnnnnnnnnnnnnnnnnnnnnnnnnnnnnnnnnnnnnnnnnnnnnnnnnnnnnnnnnnnnnnnnnnnnnnnnnnnnnnnnnnnnnnnnnnnnnnnnnnnnnnnnnnnnnnnnnnnnnnnnnnnnnnnnnnnnnnnnnnnnnnnnnnnnnnnnnnnnnnnnnnnnnnnnnnnnnnnnnnnnnnnnnnnnnnnnnnnnnnnnnnnnnnnnnnnnnnnnnnnnnnnnnnnnnnnnnnnnnnnnnnnnnnnnnnnnnnnnnnnnnnnnnnnnnnnnnnnnnnnnnnnnnnnnnnnnnnnnnnnnnnnnnnnnnnnnnnnnnnnnnnnnnnnnnnnnnnnnnnnnnnnnnnnnnnnnnnnnnnnnnnnnnnnnnnnnnnnnnnnnnnnnnnnnnnnnnnnnnnnnnnnnnnnnnnnnnnnnnnnnnnnnnnnnnnnnnnnnnnnnnnnnnnnnnnnnnnnnnnnnnnnnnnnnnnnnnnnnnnnnnnnnnnnnnnnnnnnnnnnnnnnnnnnnnnnnnnnnnnnnnnnnnnnnnnnnnnnnnnnnnnnnnnnnnnnnnnnnnnnnnnnnnnnnnnnnnnnnnnnnnnnnnnnnnnnnnnnnnnnnnnnnnnnnnnnnnnnnnnnnnnnnnnnnnnnnnnnnnnnnnnnnnnnnnnnnnnnnnnnnnnnnnnnnnnnnnnnnnnnnnnnnnnnnnnnnnnnnnnnnnnnnnnnnnnnnnnnnnnnnnnnnnnnnnnnnnnnnnnnnnnnnnnnnnnnnnnnnnnnnnnnnnnnnnnnnnnnnnnnnnnnnnnnnnnnnnnnnnnnnnnnnnnnnnnnnnnnnnnnnnnnnnnnnnnnnnnnnnnnnnnnnnnnnnnnnnnnnnnnnnnnnnnnnnnnnnnnnnnnnnnnnnnnnnnnnnnnnnnnnnnnnnnnnnnnnnnnnnnnnnnnnnnnnnnnnnnnnnnnnnnnnnnnnnnnnnnnnnnnnnnnnnnnnnnnnnnnnnnnnnnnnnnnnnnnnnnnnnnnnnnnnnnnnnnnnnnnnnnnnnnnnnnnnnnnnnnnnnnnnnnnnnnnnnnnnnnnnnnnnnnnnnnnnnnnnnnnnnnnnnnnnnnnnnnnnnnnnnnnnnnnnnnnnnnnnnnnnnnnnnnnnnnnnnnnnnnnnnnnnnnnnnnnnnnnnnnnnnnnnnnnnnnnnnnnnnnnnnnnnnnnnnnnnnnnnnnnnnnnnnnnnnnnnnnnnnnnnnnnnnnnnnnnnnnnnnnnnnnnnnnnnnnnnnnnnnnnnnnnnnnnnnnnnnnnnnnnnnnnnnnnnnnnnnnnnnnnnnnnnnnnnnnnnnnnnnnnnnnnnnnnnnnnnnnnnnnnnnnnnnnnnnnnnnnnnnnnnnnnnnnnnnnnnnnnnnnnnnnnnnnnnnnnnnnnnnnnnnnnnnnnnnnnnnnnnnnnnnnnnnnnnnnnnnnnnnnnnnnnnnnnnnnnnnnnnnnnnnnnnnnnnnnnnnnnnnnnnnnnnnnnnnnnnnnnnnnnnnnnnnnnnnnnnnnnnnnnnnnnnnnnnnnnnnnnnnnnnnnnnnnnnnnnnnnnnnnnnnnnnnnnnnnnnnnnnnnnnnnnnnnnnnnnnnnnnnnnnnnnnnnnnnnnnnnnnnnnnnnnnnnnnnnnnnnnnnnnnnnnnnnnnnnnnnnnnnnnnnnnnnnnnnnnnnnnnnnnnnnnnnnnnnnnnnnnnnnnnnnnnnnnnnnnnnnnnnnnnnnnnnnnnnnnnnnnnnnnnnnnnnnnnnnnnnnnnnnnnnnnnnnnnnnnnnnnnnnnnnnnnnnnnnnnnnnnnnnnnnnnnnnnnnnnnnnnnnnnnnnnnnnnnnnnnnnnnnnnnnnnnnnnnnnnnnnnnnnnnnnnnnnnnnnnnnnnnnnnnnnnnnnnnnnnnnnnnnnnnnnnnnnnnnnnnnnnnnnnnnnnnnnnnnnnnnnnnnnnnnnnnnnnnnnnnnnnnnnnnnnnnnnnnnnnnnnnnnnnnnnnnnnnnnnnnnnnnnnnnnnnnnnnnnnnnnnnnnnnnnnnnnnnnnnnnnnnnnnnnnnnnnnnnnnnnnnnnnnnnnnnnnnnnnnnnnnnnnnnnnnnnnnnnnnnnnnnnnnnnnnnnnnnnnnnnnnnnnnnnnnnnnnnnnnnnnnnnnnnnnnnnnnnnnnnnnnnnnnnnnnnnnnnnnnnnnnnnnnnnnnnnnnnnnnnnnnnnnnnnnnnnnnnnnnnnnnnnnnnnnnnnnnnnnnnnnnnnnnnnnnnnnnnnnnnnnnnnnnnnnnnnnnnnnnnnnnnnnnnnnnnnnnnnnnnnnnnnnnnnnnnnnnnnnnnnnnnnnnnnnnnnnnnnnnnnnnnnnnnnnnnnnnnnnnnnnnnnnnnnnnnnnnnnnnnnnnnnnnnnnnnnnnnnnnnnnnnnnnnnnnnnnnnnnnnnnnnnnnnnnnnnnnnnnnnnnnnnnnnnnnnnnnnnnnnnnnnnnnnnnnnnnnnnnnnnnnnnnnnnnnnnnnnnnnnnnnnnnnnnnnnnnnnnnnnnnnnnnnnnnnnnnnnnnnnnnnnnnnnnnnnnnnnnnnnnnnnnnnnnnnnnnnnnnnnnnnnnnnnnnnnnnnnnnnnnnnnnnnnnnnnnnnnnnnnnnnnnnnnnnnnnnnnnnnnnnnnnnnnnnnnnnnnnnnnnnnnnnnnnnnnnnnnnnnnnnnnnnnnnnnnnnnnnnnnnnnnnnnnnnnnnnnnnnnnnnnnnnnnnnnnnnnnnnnnnnnnnnnnnnnnnnnnnnnnnnnnnnnnnnnnnnnnnnnnnnnnnnnnnnnnnnnnnnnnnnnnnnnnnnnnnnnnnnnnnnnnnnnnnnnnnnnnnnnnnnnnnnnnnnnnnnnnnnnnnnnnnnnnnnnnnnnnnnnnnnnnnnnnnnnnnnnnnnnnnnnnnnnnnnnnnnnnnnnnnnnnnnnnnnnnnnnnnnnnnnnnnnnnnnnnnnnnnnnnnnnnnnnnnnnnnnnnnnnnnnnnnnnnnnnnnnnnnnnnnnnnnnnnnnnnnnnnnnnnnnnnnnnnnnnnnnnnnnnnnnnnnnnnnnnnnnnnnnnnnnnnnnnnnnnnnnnnnnnnnnnnnnnnnnnnnnnnnnnnnnnnnnnnnnnnnnnnnnnnnnnnnnnnnnnnnnnnnnnnnnnnnnnnnnnnnnnnnnnnnnnnnnnnnnnnnnnnnnnnnnnnnnnnnnnnnnnnnnnnnnnnnnnnnnnnnnnnnnnnnnnnnnnnnnnnnnnnnnnnnnnnnnnnnnnnnnnnnnnnnnnnnnnnnnnnnnnnnnnnnnnnnnnnnnnnnnnnnnnnnnnnnnnnnnnnnnnnnnnnnnnnnnnnnnnnnnnnnnnnnnnnnnnnnnnnnnnnnnnnnnnnnnnnnnnnnnnnnnnnnnnnnnnnnnnnnnnnnnnnnnnnnnnnnnnnnnnnnnnnnnnnnnnnnnnnnnnnnnnnnnnnnnnnnnnnnnnnnnnnnnnnnnnnnnnnnnnnnnnnnnnnnnnnnnnnnnnnnnnnnnnnnnnnnnnnnnnnnnnnnnnnnnnnnnnnnnnnnnnnnnnnnnnnnnnnnnnnnnnnnnnnnnnnnnnnnnnnnnnnnnnnnnnnnnnnnnnnnnnnnnnnnnnnnnnnnnnnnnnnnnnnnnnnnnnnnnnnnnnnnnnnnnnnnnnnnnnnnnnnnnnnnnnnnnnnnnnnnnnnnnnnnnnnnnnnnnnnnnnnnnnnnnnnnnnnnnnnnnnnnnnnnnnnnnnnnnnnnnnnnnnnnnnnnnnnnnnnnnnnnnnnnnnnnnnnnnnnnnnnnnnnnnnnnnnnnnnnnnnnnnnnnnnnnnnnnnnnnnnnnnnnnnnnnnnnnnnnnnnnnnnnnnnnnnnnnnnnnnnnnnnnnnnnnnnnnnnnnnnnnnnnnnnnnnnnnnnnnnnnnnnnnnnnnnnnnnnnnnnnnnnnnnnnnnnnnnnnnnnnnnnnnnnnnnnnnnnnnnnnnnnnnnnnnnnnnnnnnnnnnnnnnnnnnnnnnnnnnnnnnnnnnnnnnnnnnnnnnnnnnnnnnnnnnnnnnnnnnnnnnnnnnnnnnnnnnnnnnnnnnnnnnnnnnnnnnnnnnnnnnnnnnnnnnnnnnnnnnnnnnnnnnnnnnnnnnnnnnnnnnnnnnnnnnnnnnnnnnnnnnnnnnnnnnnnnnnnnnnnnnnnnnnnnnnnnnnnnnnnnnnnnnnnnnnnnnnnnnnnnnnnnnnnnnnnnnnnnnnnnnnnnnnnnnnnnnnnnnnnnnnnnnnnnnnnnnnnnnnnnnnnnnnnnnnnnnnnnnnnnnnnnnnnnnnnnnnnnnnnnnnnnnnnnnnnnnnnnnnnnnnnnnnnnnnnnnnnnnnnnnnnnnnnnnnnnnnnnnnnnnnnnnnnnnnnnnnnnnnnnnnnnnnnnnnnnnnnnnnnnnnnnnnnnnnnnnnnnnnnnnnnnnnnnnnnnnnnnnnnnnnnnnnnnnnnnnnnnnnnnnnnnnnnnnnnnnnnnnnnnnnnnnnnnnnnnnnnnnnnnnnnnnnnnnnnnnnnnnnnnnnnnnnnnnnnnnnnnnnnnnnnnnnnnnnnnnnnnnnnnnnnnnnnnnnnnnnnnnnnnnnnnnnnnnnnnnnnnnnnnnnnnnnnnnnnnnnnnnnnnnnnnnnnnnnnnnnnnnnnnnnnnnnnnnnnnnnnnnnnnnnnnnnnnnnnnnnnnnnnnnnnnnnnnnnnnnnnnnnnnnnnnnnnnnnnnnnnnnnnnnnnnnnnnnnnnnnnnnnnnnnnnnnnnnnnnnnnnnnnnnnnnnnnnnnnnnnnnnnnnnnnnnnnnnnnnnnnnnnnnnnnnnnnnnnnnnnnnnnnnnnnnnnnnnnnnnnnnnnnnnnnnnnnnnnnnnnnnnnnnnnnnnnnnnnnnnnnnnnnnnnnnnnnnnnnnnnnnnnnnnnnnnnnnnnnnnnnnnnnnnnnnnnnnnnnnnnnnnnnnnnnnnnnnnnnnnnnnnnnnnnnnnnnnnnnnnnnnnnnnnnnnnnnnnnnnnnnnnnnnnnnnnnnnnnnnnnnnnnnnnnnnnnnnnnnnnnnnnnnnnnnnnnnnnnnnnnnnnnnnnnnnnnnnnnnnnnnnnnnnnnnnnnnnnnnnnnnnnnnnnnnnnnnnnnnnnnnnnnnnnnnnnnnnnnnnnnnnnnnnnnnnnnnnnnnnnnnnnnnnnnnnnnnnnnnnnnnnnnnnnnnnnnnnnnnnnnnnnnnnnnnnnnnnnnnnnnnnnnnnnnnnnnnnnnnnnnnnnnnnnnnnnnnnnnnnnnnnnnnnnnnnnnnnnnnnnnnnnnnnnnnnnnnnnnnnnnnnnnnnnnnnnnnnnnnnnnnnnnnnnnnnnnnnnnnnnnnnnnnnnnnnnnnnnnnnnnnnnnnnnnnnnnnnnnnnnnnnnnnnnnnnnnnnnnnnnnnnnnnnnnnnnnnnnnnnnnnnnnnnnnnnnnnnnnnnnnnnnnnnnnnnnnnnnnnnnnnnnnnnnnnnnnnnnnnnnnnnnnnnnnnnnnnnnnnnnnnnnnnnnnnnnnnnnnnnnnnnnnnnnnnnnnnnnnnnnnnnnnnnnnnnnnnnnnnnnnnnnnnnnnnnnnnnnnnnnnnnnnnnnnnnnnnnnnnnnnnnnnnnnnnnnnnnnnnnnnnnnnnnnnnnnnnnnnnnnnnnnnnnnnnnnnnnnnnnnnnnnnnnnnnnnnnnnnnnnnnnnnnnnnnnnnnnnnnnnnnnnnnnnnnnnnnnnnnnnnnnnnnnnnnnnnnnnnnnnnnnnnnnnnnnnnnnnnnnnnnnnnnnnnnnnnnnnnnnnnnnnnnnnnnnnnnnnnnnnnnnnnnnnnnnnnnnnnnnnnnnnnnnnnnnnnnnnnnnnnnnnnnnnnnnnnnnnnnnnnnnnnnnnnnnnnnnnnnnnnnnnnnnnnnnnnnnnnnnnnnnnnnnnnnnnnnnnnnnnnnnnnnnnnnnnnnnnnnnnnnnnnnnnnnnnnnnnnnnnnnnnnnnnnnnnnnnnnnnnnnnnnnnnnnnnnnnnnnnnnnnnnnnnnnnnnnnnnnnnnnnnnnnnnnnnnnnnnnnnnnnnnnnnnnnnnnnnnnnnnnnnnnnnnnnnnnnnnnnnnnnnnnnnnnnnnnnnnnnnnnnnnnnnnnnnnnnnnnnnnnnnnnnnnnnnnnnnnnnnnnnnnnnnnnnnnnnnnnnnnnnnnnnnnnnnnnnnnnnnnnnnnnnnnnnnnnnnnnnnnnnnnnnnnnnnnnnnnnnnnnnnnnnnnnnnnnnnnnnnnnnnnnnnnnnnnnnnnnnnnnnnnnnnnnnnnnnnnnnnnnnnnnnnnnnnnnnnnnnnnnnnnnnnnnnnnnnnnnnnnnnnnnnnnnnnnnnnnnnnnnnnnnnnnnnnnnnnnnnnnnnnnnnnnnnnnnnnnnnnnnnnnnnnnnnnnnnnnnnnnnnnnnnnnnnnnnnnnnnnnnnnnnnnnnnnnnnnnnnnnnnnnnnnnnnnnnnnnnnnnnnnnnnnnnnnnnnnnnnnnnnnnnnnnnnnnnnnnnnnnnnnnnnnnnnnnnnnnnnnnnnnnnnnnnnnnnnnnnnnnnnnnnnnnnnnnnnnnnnnnnnnnnnnnnnnnnnnnnnnnnnnnnnnnnnnnnnnnnnnnnnnnnnnnnnnnnnnnnnnnnnnnnnnnnnnnnnnnnnnnnnnnnnnnnnnnnnnnnnnnnnnnnnnnnnnnnnnnnnnnnnnnnnnnnnnnnnnnnnnnnnnnnnnnnnnnnnnnnnnnnnnnnnnnnnnnnnnnnnnnnnnnnnnnnnnnnnnnnnnnnnnnnnnnnnnnnnnnnnnnnnnnnnnnnnnnnnnnnnnnnnnnnnnnnnnnnnnnnnnnnnnnnnnnnnnnnnnnnnnnnnnnnnnnnnnnnnnnnnnnnnnnnnnnnnnnnnnnnnnnnnnnnnnnnnnnnnnnnnnnnnnnnnnnnnnnnnnnnnnnnnnnnnnnnnnnnnnnnnnnnnnnnnnnnnnnnnnnnnnnnnnnnnnnnnnnnnnnnnnnnnnnnnnnnnnnnnnnnnnnnnnnnnnnnnnnnnnnnnnnnnnnnnnnnnnnnnnnnnnnnnnnnnnnnnnnnnnnnnnnnnnnnnnnnnnnnnnnnnnnnnnnnnnnnnnnnnnnnnnnnnnnnnnnnnnnnnnnnnnnnnnnnnnnnnnnnnnnnnnnnnnnnnnnnnnnnnnnnnnnnnnnnnnnnnnnnnnnnnnnnnnnnnnnnnnnnnnnnnnnnnnnnnnnnnnnnnnnnnnnnnnnnnnnnnnnnnnnnnnnnnnnnnnnnnnnnnnnnnnnnnnnnnnnnnnnnnnnnnnnnnnnnnnnnnnnnnnnnnnnnnnnnnnnnnnnnnnnnnnnnnnnnnnnnnnnnnnnnnnnnnnnnnnnnnnnnnnnnnnnnnnnnnnnnnnnnnnnnnnnnnnnnnnnnnnnnnnnnnnnnnnnnnnnnnnnnnnnnnnnnnnnnnnnnnnnnnnnnnnnnnnnnnnnnnnnnnnnnnnnnnnnnnnnnnnnnnnnnnnnnnnnnnnnnnnnnnnnnnnnnnnnnnnnnnnnnnnnnnnnnnnnnnnnnnnnnnnnnnnnnnnnnnnnnnnnnnnnnnnnnnnnnnnnnnnnnnnnnnnnnnnnnnnnnnnnnnnnnnnnnnnnnnnnnnnnnnnnnnnnnnnnnnnnnnnnnnnnnnnnnnnnnnnnnnnnnnnnnnnnnnnnnnnnnnnnnnnnnnnnnnnnnnnnnnnnnnnnnnnnnnnnnnnnnnnnnnnnnnnnnnnnnnnnnnnnnnnnnnnnnnnnnnnnnnnnnnnnnnnnnnnnnnnnnnnnnnnnnnnnnnnnnnnnnnnnnnnnnnnnnnnnnnnnnnnnnnnnnnnnnnnnnnnnnnnnnnnnnnnnnnnnnnnnnnnnnnnnnnnnnnnnnnnnnnnnnnnnnnnnnnnnnnnnnnnnnnnnnnnnnnnnnnnnnnnnnnnnnnnnnnnnnnnnnnnnnnnnnnnnnnnnnnnnnnnnnnnnnnnnnnnnnnnnnnnnnnnnnnnnnnnnnnnnnnnnnnnnnnnnnnnnnnnnnnnnnnnnnnnnnnnnnnnnnnnnnnnnnnnnnnnnnnnnnnnnnnnnnnnnnnnnnnnnnnnnnnnnnnnnnnnnnnnnnnnnnnnnnnnnnnnnnnnnnnnnnnnnnnnnnnnnnnnnnnnnnnnnnnnnnnnnnnnnnnnnnnnnnnnnnnnnnnnnnnnnnnnnnnnnnnnnnnnnnnnnnnnnnnnnnnnnnnnnnnnnnnnnnnnnnnnnnnnnnnnnnnnnnnnnnnnnnnnnnnnnnnnnnnnnnnnnnnnnnnnnnnnnnnnnnnnnnnnnnnnnnnnnnnnnnnnnnnnnnnnnnnnnnnnnnnnnnnnnnnnnnnnnnnnnnnnnnnnnnnnnnnnnnnnnnnnnnnnnnnnnnnnnnnnnnnnnnnnnnnnnnnnnnnnnnnnnnnnnnnnnnnnnnnnnnnnnnnnnnnnnnnnnnnnnnnnnnnnnnnnnnnnnnnnnnnnnnnnnnnnnnnnnnnnnnnnnnnnnnnnnnnnnnnnnnnnnnnnnnnnnnnnnnnnnnnnnnnnnnnnnnnnnnnnnnnnnnnnnnnnnnnnnnnnnnnnnnnnnnnnnnnnnnnnnnnnnnnnnnnnnnnnnnnnnnnnnnnnnnnnnnnnnnnnnnnnnnnnnnnnnnnnnnnnnnnnnnnnnnnnnnnnnnnnnnnnnnnnnnnnnnnnnnnnnnnnnnnnnnnnnnnnnnnnnnnnnnnnnnnnnnnnnnnnnnnnnnnnnnnnnnnnnnnnnnnnnnnnnnnnnnnnnnnnnnnnnnnnnnnnnnnnnnnnnnnnnnnnnnnnnnnnnnnnnnnnnnnnnnnnnnnnnnnnnnnnnnnnnnnnnnnnnnnnnnnnnnnnnnnnnnnnnnnnnnnnnnnnnnnnnnnnnnnnnnnnnnnnnnnnnnnnnnnnnnnnnnnnnnnnnnnnnnnnnnnnnnnnnnnnnnnnnnnnnnnnnnnnnnnnnnnnnnnnnnnnnnnnnnnnnnnnnnnnnnnnnnnnnnnnnnnnnnnnnnnnnnnnnnnnnnnnnnnnnnnnnnnnnnnnnnnnnnnnnnnnnnnnnnnnnnnnnnnnnnnnnnnnnnnnnnnnnnnnnnnnnnnnnnnnnnnnnnnnnnnnnnnnnnnnnnnnnnnnnnnnnnnnnnnnnnnnnnnnnnnnnnnnnnnnnnnnnnnnnnnnnnnnnnnnnnnnnnnnnnnnnnnnnnnnnnnnnnnnnnnnnnnnnnnnnnnnnnnnnnnnnnnnnnnnnnnnnnnnnnnnnnnnnnnnnnnnnnnnnnnnnnnnnnnnnnnnnnnnnnnnnnnnnnnnnnnnnnnnnnnnnnnnnnnnnnnnnnnnnnnnnnnnnnnnnnnnnnnnnnnnnnnnnnnnnnnnnnnnnnnnnnnnnnnnnnnnnnnnnnnnnnnnnnnnnnnnnnnnnnnnnnnnnnnnnnnnnnnnnnnnnnnnnnnnnnnnnnnnnnnnnnnnnnnnnnnnnnnnnnnnnnnnnnnnnnnnnnnnnnnnnnnnnnnnnnnnnnnnnnnnnnnnnnnnnnnnnnnnnnnnnnnnnnnnnnnnnnnnnnnnnnnnnnnnnnnnnnnnnnnnnnnnnnnnnnnnnnnnnnnnnnnnnnnnnnnnnnnnnnnnnnnnnnnnnnnnnnnnnnnnnnnnnnnnnnnnnnnnnnnnnnnnnnnnnnnnnnnnnnnnnnnnnnnnnnnnnnnnnnnnnnnnnnnnnnnnnnnnnnnnnnnnnnnnnnnnnnnnnnnnnnnnnnnnnnnnnnnnnnnnnnnnnnnnnnnnnnnnnnnnnnnnnnnnnnnnnnnnnnnnnnnnnnnnnnnnnnnnnnnnnnnnnnnnnnnnnnnnnnnnnnnnnnnnnnnnnnnnnnnnnnnnnnnnnnnnnnnnnnnnnnnnnnnnnnnnnnnnnnnnnnnnnnnnnnnnnnnnnnnnnnnnnnnnnnnnnnnnnnnnnnnnnnnnnnnnnnnnnnnnnnnnnnnnnnnnnnnnnnnnnnnnnnnnnnnnnnnnnnnnnnnnnnnnnnnnnnnnnnnnnnnnnnnnnnnnnnnnnnnnnnnnnnnnnnnnnnnnnnnnnnnnnnnnnnnnnnnnnnnnnnnnnnnnnnnnnnnnnnnnnnnnnnnnnnnnnnnnnnnnnnnnnnnnnnnnnnnnnnnnnnnnnnnnnnnnnnnnnnnnnnnnnnnnnnnnnnnnnnnnnnnnnnnnnnnnnnnnnnnnnnnnnnnnnnnnnnnnnnnnnnnnnnnnnnnnnnnnnnnnnnnnnnnnnnnnnnnnnnnnnnnnnnnnnnnnnnnnnnnnnnnnnnnnnnnnnnnnnnnnnnnnnnnnnnnnnnnnnnnnnnnnnnnnnnnnnnnnnnnnnnnnnnnnnnnnnnnnnnnnnnnnnnnnnnnnnnnnnnnnnnnnnnnnnnnnnnnnnnnnnnnnnnnnnnnnnnnnnnnnnnnnnnnnnnnnnnnnnnnnnnnnnnnnnnnnnnnnnnnnnnnnnnnnnnnnnnnnnnnnnnnnnnnnnnnnnnnnnnnnnnnnnnnnnnnnnnnnnnnnnnnnnnnnnnnnnnnnnnnnnnnnnnnnnnnnnnnnnnnnnnnnnnnnnnnnnnnnnnnnnnnnnnnnnnnnnnnnnnnnnnnnnnnnnnnnnnnnnnnnnnnnnnnnnnnnnnnnnnnnnnnnnnnnnnnnnnnnnnnnnnnnnnnnnnnnnnnnnnnnnnnnnnnnnnnnnnnnnnnnnnnnnnnnnnnnnnnnnnnnnnnnnnnnnnnnnnnnnnnnnnnnnnnnnnnnnnnnnnnnnnnnnnnnnnnnnnnnnnnnnnnnnnnnnnnnnnnnnnnnnnnnnnnnnnnnnnnnnnnnnnnnnnnnnnnnnnnnnnnnnnnnnnnnnnnnnnnnnnnnnnnnnnnnnnnnnnnnnnnnnnnnnnnnnnnnnnnnnnnnnnnnnnnnnnnnnnnnnnnnnnnnnnnnnnnnnnnnnnnnnnnnnnnnnnnnnnnnnnnnnnnnnnnnnnnnnnnnnnnnnnnnnnnnnnnnnnnnnnnnnnnnnnnnnnnnnnnnnnnnnnnnnnnnnnnnnnnnnnnnnnnnnnnnnnnnnnnnnnnnnnnnnnnnnnnnnnnnnnnnnnnnnnnnnnnnnnnnnnnnnnnnnnnnnnnnnnnnnnnnnnnnnnnnnnnnnnnnnnnnnnnnnnnnnnnnnnnnnnnnnnnnnnnnnnnnnnnnnnnnnnnnnnnnnnnnnnnnnnnnnnnnnnnnnnnnnnnnnnnnnnnnnnnnnnnnnnnnnnnnnnnnnnnnnnnnnnnnnnnnnnnnnnnnnnnnnnnnnnnnnnnnnnnnnnnnnnnnnnnnnnnnnnnnnnnnnnnnnnnnnnnnnnnnnnnnnnnnnnnnnnnnnnnnnnnnnnnnnnnnnnnnnnnnnnnnnnnnnnnnnnnnnnnnnnnnnnnnnnnnnnnnnnnnnnnnnnnnnnnnnnnnnnnnnnnnnnnnnnnnnnnnnnnnnnnnnnnnnnnnnnnnnnnnnnnnnnnnnnnnnnnnnnnnnnnnnnnnnnnnnnnnnnnnnnnnnnnnnnnnnnnnnnnnnnnnnnnnnnnnnnnnnnnnnnnnnnnnnnnnnnnnnnnnnnnnnnnnnnnnnnnnnnnnnnnnnnnnnnnnnnnnnnnnnnnnnnnnnnnnnnnnnnnnnnnnnnnnnnnnnnnnnnnnnnnnnnnnnnnnnnnnnnnnnnnnnnnnnnnnnnnnnnnnnnnnnnnnnnnnnnnnnnnnnnnnnnnnnnnnnnnnnnnnnnnnnnnnnnnnnnnnnnnnnnnnnnnnnnnnnnnnnnnnnnnnnnnnnnnnnnnnnnnnnnnnnnnnnnnnnnnnnnnnnnnnnnnnnnnnnnnnnnnnnnnnnnnnnnnnnnnnnnnnnnnnnnnnnnnnnnnnnnnnnnnnnnnnnnnnnnnnnnnnnnnnnnnnnnnnnnnnnnnnnnnnnnnnnnnnnnnnnnnnnnnnnnnnnnnnnnnnnnnnnnnnnnnnnnnnnnnnnnnnnnnnnnnnnnnnnnnnnnnnnnnnnnnnnnnnnnnnnnnnnnnnnnnnnnnnnnnnnnnnnnnnnnnnnnnnnnnnnnnnnnnnnnnnnnnnnnnnnnnnnnnnnnnnnnnnnnnnnnnnnnnnnnnnnnnnnnnnnnnnnnnnnnnnnnnnnnnnnnnnnnnnnnnnnnnnnnnnnnnnnnnnnnnnnnnnnnnnnnnnnnnnnnnnnnnnnnnnnnnnnnnnnnnnnnnnnnnnnnnnnnnnnnnnnnnnnnnnnnnnnnnnnnnnnnnnnnnnnnnnnnnnnnnnnnnnnnnnnnnnnnnnnnnnnnnnnnnnnnnnnnnnnnnnnnnnnnnnnnnnnnnnnnnnnnnnnnnnnnnnnnnnnnnnnnnnnnnnnnnnnnnnnnnnnnnnnnnnnnnnnnnnnnnnnnnnnnnnnnnnnnnnnnnnnnnnnnnnnnnnnnnnnnnnnnnnnnnnnnnnnnnnnnnnnnnnnnnnnnnnnnnnnnnnnnnnnnnnnnnnnnnnnnnnnnnnnnnnnnnnnnnnnnnnnnnnnnnnnnnnnnnnnnnnnnnnnnnnnnnnnnnnnnnnnnnnnnnnnnnnnnnnnnnnnnnnnnnnnnnnnnnnnnnnnnnnnnnnnnnnnnnnnnnnnnnnnnnnnnnnnnnnnnnnnnnnnnnnnnnnnnnnnnnnnnnnnnnnnnnnnnnnnnnnnnnnnnnnnnnnnnnnnnnnnnnnnnnnnnnnnnnnnnnnnnnnnnnnnnnnnnnnnnnnnnnnnnnnnnnnnnnnnnnnnnnnnnnnnnnnnnnnnnnnnnnnnnnnnnnnnnnnnnnnnnnnnnnnnnnnnnnnnnnnnnnnnnnnnnnnnnnnnnnnnnnnnnnnnnnnnnnnnnnnnnnnnnnnnnnnnnnnnnnnnnnnnnnnnnnnnnnnnnnnnnnnnnnnnnnnnnnnnnnnnnnnnnnnnnnnnnnnnnnnnnnnnnnnnnnnnnnnnnnnnnnnnnnnnnnnnnnnnnnnnnnnnnnnnnnnnnnnnnnnnnnnnnnnnnnnnnnnnnnnnnnnnnnnnnnnnnnnnnnnnnnnnnnnnnnnnnnnnnnnnnnnnnnnnnnnnnnnnnnnnnnnnnnnnnnnnnnnnnnnnnnnnnnnnnnnnnnnnnnnnnnnnnnnnnnnnnnnnnnnnnnnnnnnnnnnnnnnnnnnnnnnnnnnnnnnnnnnnnnnnnnnnnnnnnnnnnnnnnnnnnnnnnnnnnnnnnnnnnnnnnnnnnnnnnnnnnnnnnnnnnnnnnnnnnnnnnnnnnnnnnnnnnnnnnnnnnnnnnnnnnnnnnnnnnnnnnnnnnnnnnnnnnnnnnnnnnnnnnnnnnnnnnnnnnnnnnnnnnnnnnnnnnnnnnnnnnnnnnnnnnnnnnnnnnnnnnnnnnnnnnnnnnnnnnnnnnnnnnnnnnnnnnnnnnnnnnnnnnnnnnnnnnnnnnnnnnnnnnnnnnnnnnnnnnnnnnnnnnnnnnnnnnnnnnnnnnnnnnnnnnnnnnnnnnnnnnnnnnnnnnnnnnnnnnnnnnnnnnnnnnnnnnnnnnnnnnnnnnnnnnnnnnnnnnnnnnnnnnnnnnnnnnnnnnnnnnnnnnnnnnnnnnnnnnnnnnnnnnnnnnnnnnnnnnnnnnnnnnnnnnnnnnnnnnnnnnnnnnnnnnnnnnnnnnnnnnnnnnnnnnnnnnnnnnnnnnnnnnnnnnnnnnnnnnnnnnnnnnnnnnnnnnnnnnnnnnnnnnnnnnnnnnnnnnnnnnnnnnnnnnnnnnnnnnnnnnnnnnnnnnnnnnnnnnnnnnnnnnnnnnnnnnnnnnnnnnnnnnnnnnnnnnnnnnnnnnnnnnnnnnnnnnnnnnnnnnnnnnnnnnnnnnnnnnnnnnnnnnnnnnnnnnnnnnnnnnnnnnnnnnnnnnnnnnnnnnnnnnnnnnnnnnnnnnnnnnnnnnnnnnnnnnnnnnnnnnnnnnnnnnnnnnnnnnnnnnnnnnnnnnnnnnnnnnnnnnnnnnnnnnnnnnnnnnnnnnnnnnnnnnnnnnnnnnnnnnnnnnnnnnnnnnnnnnnnnnnnnnnnnnnnnnnnnnnnnnnnnnnnnnnnnnnnnnnnnnnnnnnnnnnnnnnnnnnnnnnnnnnnnnnnnnnnnnnnnnnnnnnnnnnnnnnnnnnnnnnnnnnnnnnnnnnnnnnnnnnnnnnnnnnnnnnnnnnnnnnnnnnnnnnnnnnnnnnnnnnnnnnnnnnnnnnnnnnnnnnnnnnnnnnnnnnnnnnnnnnnnnnnnnnnnnnnnnnnnnnnnnnnnnnnnnnnnnnnnnnnnnnnnnnnnnnnnnnnnnnnnnnnnnnnnnnnnnnnnnnnnnnnnnnnnnnnnnnnnnnnnnnnnnnnnnnnnnnnnnnnnnnnnnnnnnnnnnnnnnnnnnnnnnnnnnnnnnnnnnnnnnnnnnnnnnnnnnnnnnnnnnnnnnnnnnnnnnnnnnnnnnnnnnnnnnnnnnnnnnnnnnnnnnnnnnnnnnnnnnnnnnnnnnnnnnnnnnnnnnnnnnnnnnnnnnnnnnnnnnnnnnnnnnnnnnnnnnnnnnnnnnnnnnnnnnnnnnnnnnnnnnnnnnnnnnnnnnnnnnnnnnnnnnnnnnnnnnnnnnnnnnnnnnnnnnnnnnnnnnnnnnnnnnnnnnnnnnnnnnnnnnnnnnnnnnnnnnnnnnnnnnnnnnnnnnnnnnnnnnnnnnnnnnnnnnnnnnnnnnnnnnnnnnnnnnnnnnnnnnnnnnnnnnnnnnnnnnnnnnnnnnnnnnnnnnnnnnnnnnnnnnnnnnnnnnnnnnnnnnnnnnnnnnnnnnnnnnnnnnnnnnnnnnnnnnnnnnnnnnnnnnnnnnnnnnnnnnnnnnnnnnnnnnnnnnnnnnnnnnnnnnnnnnnnnnnnnnnnnnnnnnnnnnnnnnnnnnnnnnnnnnnnnnnnnnnnnnnnnnnnnnnnnnnnnnnnnnnnnnnnnnnnnnnnnnnnnnnnnnnnnnnnnnnnnnnnnnnnnnnnnnnnnnnnnnnnnnnnnnnnnnnnnnnnnnnnnnnnnnnnnnnnnnnnnnnnnnnnnnnnnnnnnnnnnnnnnnnnnnnnnnnnnnnnnnnnnnnnnnnnnnnnnnnnnnnnnnnnnnnnnnnnnnnnnnnnnnnnnnnnnnnnnnnnnnnnnnnnnnnnnnnnnnnnnnnnnnnnnnnnnnnnnnnnnnnnnnnnnnnnnnnnnnnnnnnnnnnnnnnnnnnnnnnnnnnnnnnnnnnnnnnnnnnnnnnnnnnnnnnnnnnnnnnnnnnnnnnnnnnnnnnnnnnnnnnnnnnnnnnnnnnnnnnnnnnnnnnnnnnnnnnnnnnnnnnnnnnnnnnnnnnnnnnnnnnnnnnnnnnnnnnnnnnnnnnnnnnnnnnnnnnnnnnnnnnnnnnnnnnnnnnnnnnnnnnnnnnnnnnnnnnnnnnnnnnnnnnnnnnnnnnnnnnnnnnnnnnnnnnnnnnnnnnnnnnnnnnnnnnnnnnnnnnnnnnnnnnnnnnnnnnnnnnnnnnnnnnnnnnnnnnnnnnnnnnnnnnnnnnnnnnnnnnnnnnnnnnnnnnnnnnnnnnnnnnnnnnnnnnnnnnnnnnnnnnnnnnnnnnnnnnnnnnnnnnnnnnnnnnnnnnnnnnnnnnnnnnnnnnnnnnnnnnnnnnnnnnnnnnnnnnnnnnnnnnnnnnnnnnnnnnnnnnnnnnnnnnnnnnnnnnnnnnnnnnnnnnnnnnnnnnnnnnnnnnnnnnnnnnnnnnnnnnnnnnnnnnnnnnnnnnnnnnnnnnnnnnnnnnnnnnnnnnnnnnnnnnnnnnnnnnnnnnnnnnnnnnnnnnnnnnnnnnnnnnnnnnnnnnnnnnnnnnnnnnnnnnnnnnnnnnnnnnnnnnnnnnnnnnnnnnnnnnnnnnnnnnnnnnnnnnnnnnnnnnnnnnnnnnnnnnnnnnnnnnnnnnnnnnnnnnnnnnnnnnnnnnnnnnnnnnnnnnnnnnnnnnnnnnnnnnnnnnnnnnnnnnnnnnnnnnnnnnnnnnnnnnnnnnnnnnnnnnnnnnnnnnnnnnnnnnnnnnnnnnnnnnnnnnnnnnnnnnnnnnnnnnnnnnnnnnnnnnnnnnnnnnnnnnnnnnnnnnnnnnnnnnnnnnnnnnnnnnnnnnnnnnnnnnnnnnnnnnnnnnnnnnnnnnnnnnnnnnnnnnnnnnnnnnnnnnnnnnnnnnnnnnnnnnnnnnnnnnnnnnnnnnnnnnnnnnnnnnnnnnnnnnnnnnnnnnnnnnnnnnnnnnnnnnnnnnnnnnnnnnnnnnnnnnnnnnnnnnnnnnnnnnnnnnnnnnnnnnnnnnnnnnnnnnnnnnnnnnnnnnnnnnnnnnnnnnnnnnnnnnnnnnnnnnnnnnnnnnnnnnnnnnnnnnnnnnnnnnnnnnnnnnnnnnnnnnnnnnnnnnnnnnnnnnnnnnnnnnnnnnnnnnnnnnnnnnnnnnnnnnnnnnnnnnnnnnnnnnnnnnnnnnnnnnnnnnnnnnnnnnnnnnnnnnnnnnnnnnnnnnnnnnnnnnnnnnnnnnnnnnnnnnnnnnnnnnnnnnnnnnnnnnnnnnnnnnnnnnnnnnnnnnnnnnnnnnnnnnnnnnnnnnnnnnnnnnnnnnnnnnnnnnnnnnnnnnnnnnnnnnnnnnnnnnnnnnnnnnnnnnnnnnnnnnnnnnnnnnnnnnnnnnnnnnnnnnnnnnnnnnnnnnnnnnnnnnnnnnnnnnnnnnnnnnnnnnnnnnnnnnnnnnnnnnnnnnnnnnnnnnnnnnnnnnnnnnnnnnnnnnnnnnnnnnnnnnnnnnnnnnnnnnnnnnnnnnnnnnnnnnnnnnnnnnnnnnnnnnnnnnnnnnnnnnnnnnnnnnnnnnnnnnnnnnnnnnnnnnnnnnnnnnnnnnnnnnnnnnnnnnnnnnnnnnnnnnnnnnnnnnnnnnnnnnnnnnnnnnnnnnnnnnnnnnnnnnnnnnnnnnnnnnnnnnnnnnnnnnnnnnnnnnnnnnnnnnnnnnnnnnnnnnnnnnnnnnnnnnnnnnnnnnnnnnnnnnnnnnnnnnnnnnnnnnnnnnnnnnnnnnnnnnnnnnnnnnnnnnnnnnnnnnnnnnnnnnnnnnnnnnnnnnnnnnnnnnnnnnnnnnnnnnnnnnnnnnnnnnnnnnnnnnnnnnnnnnnnnnnnnnnnnnnnnnnnnnnnnnnnnnnnnnnnnnnnnnnnnnnnnnnnnnnnnnnnnnnnnnnnnnnnnnnnnnnnnnnnnnnnnnnnnnnnnnnnnnnnnnnnnnnnnnnnnnnnnnnnnnnnnnnnnnnnnnnnnnnnnnnnnnnnnnnnnnnnnnnnnnnnnnnnnnnnnnnnnnnnnnnnnnnnnnnnnnnnnnnnnnnnnnnnnnnnnnnnnnnnnnnnnnnnnnnnnnnnnnnnnnnnnnnnnnnnnnnnnnnnnnnnnnnnnnnnnnnnnnnnnnnnnnnnnnnnnnnnnnnnnnnnnnnnnnnnnnnnnnnnnnnnnnnnnnnnnnnnnnnnnnnnnnnnnnnnnnnnnnnnnnnnnnnnnnnnnnnnnnnnnnnnnnnnnnnnnnnnnnnnnnnnnnnnnnnnnnnnnnnnnnnnnnnnnnnnnnnnnnnnnnnnnnnnnnnnnnnnnnnnnnnnnnnnnnnnnnnnnnnnnnnnnnnnnnnnnnnnnnnnnnnnnnnnnnnnnnnnnnnnnnnnnnnnnnnnnnnnnnnnnnnnnnnnnnnnnnnnnnnnnnnnnnnnnnnnnnnnnnnnnnnnnnnnnnnnnnnnnnnnnnnnnnnnnnnnnnnnnnnnnnnnnnnnnnnnnnnnnnnnnnnnnnnnnnnnnnnnnnnnnnnnnnnnnnnnnnnnnnnnnnnnnnnnnnnnnnnnnnnnnnnnnnnnnnnnnnnnnnnnnnnnnnnnnnnnnnnnnnnnnnnnnnnnnnnnnnnnnnnnnnnnnnnnnnnnnnnnnnnnnnnnnnnnnnnnnnnnnnnnnnnnnnnnnnnnnnnnnnnnnnnnnnnnnnnnnnnnnnnnnnnnnnnnnnnnnnnnnnnnnnnnnnnnnnnnnnnnnnnnnnnnnnnnnnnnnnnnnnnnnnnnnnnnnnnnnnnnnnnnnnnnnnnnnnnnnnnnnnnnnnnnnnnnnnnnnnnnnnnnnnnnnnnnnnnnnnnnnnnnnnnnnnnnnnnnnnnnnnnnnnnnnnnnnnnnnnnnnnnnnnnnnnnnnnnnnnnnnnnnnnnnnnnnnnnnnnnnnnnnnnnnnnnnnnnnnnnnnnnnnnnnnnnnnnnnnnnnnnnnnnnnnnnnnnnnnnnnnnnnnnnnnnnnnnnnnnnnnnnnnnnnnnnnnnnnnnnnnnnnnnnnnnnnnnnnnnnnnnnnnnnnnnnnnnnnnnnnnnnnnnnnnnnnnnnnnnnnnnnnnnnnnnnnnnnnnnnnnnnnnnnnnnnnnnnnnnnnnnnnnnnnnnnnnnnnnnnnnnnnnnnnnnnnnnnnnnnnnnnnnnnnnnnnnnnnnnnnnnnnnnnnnnnnnnnnnnnnnnnnnnnnnnnnnnnnnnnnnnnnnnnnnnnnnnnnnnnnnnnnnnnnnnnnnnnnnnnnnnnnnnnnnnnnnnnnnnnnnnnnnnnnnnnnnnnnnnnnnnnnnnnnnnnnnnnnnnnnnnnnnnnnnnnnnnnnnnnnnnnnnnnnnnnnnnnnnnnnnnnnnnnnnnnnnnnnnnnnnnnnnnnnnnnnnnnnnnnnnnnnnnnnnnnnnnnnnnnnnnnnnnnnnnnnnnnnnnnnnnnnnnnnnnnnnnnnnnnnnnnnnnnnnnnnnnnnnnnnnnnnnnnnnnnnnnnnnnnnnnnnnnnnnnnnnnnnnnnnnnnnnnnnnnnnnnnnnnnnnnnnnnnnnnnnnnnnnnnnnnnnnnnnnnnnnnnnnnnnnnnnnnnnnnnnnnnnnnnnnnnnnnnnnnnnnnnnnnnnnnnnnnnnnnnnnnnnnnnnnnnnnnnnnnnnnnnnnnnnnnnnnnnnnnnnnnnnnnnnnnnnnnnnnnnnnnnnnnnnnnnnnnnnnnnnnnnnnnnnnnnnnnnnnnnnnnnnnnnnnnnnnnnnnnnnnnnnnnnnnnnnnnnnnnnnnnnnnnnnnnnnnnnnnnnnnnnnnnnnnnnnnnnnnnnnnnnnnnnnnnnnnnnnnnnnnnnnnnnnnnnnnnnnnnnnnnnnnnnnnnnnnnnnnnnnnnnnnnnnnnnnnnnnnnnnnnnnnnnnnnnnnnnnnnnnnnnnnnnnnnnnnnnnnnnnnnnnnnnnnnnnnnnnnnnnnnnnnnnnnnnnnnnnnnnnnnnnnnnnnnnnnnnnnnnnnnnnnnnnnnnnnnnnnnnnnnnnnnnnnnnnnnnnnnnnnnnnnnnnnnnnnnnnnnnnnnnnnnnnnnnnnnnnnnnnnnnnnnnnnnnnnnnnnnnnnnnnnnnnnnnnnnnnnnnnnnnnnnnnnnnnnnnnnnnnnnnnnnnnnnnnnnnnnnnnnnnnnnnnnnnnnnnnnnnnnnnnnnnnnnnnnnnnnnnnnnnnnnnnnnnnnnnnnnnnnnnnnnnnnnnnnnnnnnnnnnnnnnnnnnnnnnnnnnnnnnnnnnnnnnnnnnnnnnnnnnnnnnnnnnnnnnnnnnnnnnnnnnnnnnnnnnnnnnnnnnnnnnnnnnnnnnnnnnnnnnnnnnnnnnnnnnnnnnnnnnnnnnnnnnnnnnnnnnnnnnnnnnnnnnnnnnnnnnnnnnnnnnnnnnnnnnnnnnnnnnnnnnnnnnnnnnnnnnnnnnnnnnnnnnnnnnnnnnnnnnnnnnnnnnnnnnnnnnnnnnnnnnnnnnnnnnnnnnnnnnnnnnnnnnnnnnnnnnnnnnnnnnnnnnnnnnnnnnnnnnnnnnnnnnnnnnnnnnnnnnnnnnnnnnnnnnnnnnnnnnnnnnnnnnnnnnnnnnnnnnnnnnnnnnnnnnnnnnnnnnnnnnnnnnnnnnnnnnnnnnnnnnnnnnnnnnnnnnnnnnnnnnnnnnnnnnnnnnnnnnnnnnnnnnnnnnnnnnnnnnnnnnnnnnnnnnnnnnnnnnnnnnnnnnnnnnnnnnnnnnnnnnnnnnnnnnnnnnnnnnnnnnnnnnnnnnnnnnnnnnnnnnnnnnnnnnnnnnnnnnnnnnnnnnnnnnnnnnnnnnnnnnnnnnnnnnnnnnnnnnnnnnnnnnnnnnnnnnnnnnnnnnnnnnnnnnnnnnnnnnnnnnnnnnnnnnnnnnnnnnnnnnnnnnnnnnnnnnnnnnnnnnnnnnnnnnnnnnnnnnnnnnnnnnnnnnnnnnnnnnnnnnnnnnnnnnnnnnnnnnnnnnnnnnnnnnnnnnnnnnnnnnnnnnnnnnnnnnnnnnnnnnnnnnnnnnnnnnnnnnnnnnnnnnnnnnnnnnnnnnnnnnnnnnnnnnnnnnnnnnnnnnnnnnnnnnnnnnnnnnnnnnnnnnnnnnnnnnnnnnnnnnnnnnnnnnnnnnnnnnnnnnnnnnnnnnnnnnnnnnnnnnnnnnnnnnnnnnnnnnnnnnnnnnnnnnnnnnnnnnnnnnnnnnnnnnnnnnnnnnnnnnnnnnnnnnnnnnnnnnnnnnnnnnnnnnnnnnnnnnnnnnnnnnnnnnnnnnnnnnnnnnnnnnnnnnnnnnnnnnnnnnnnnnnnnnnnnnnnnnnnnnnnnnnnnnnnnnnnnnnnnnnnnnnnnnnnnnnnnnnnnnnnnnnnnnnnnnnnnnnnnnnnnnnnnnnnnnnnnnnnnnnnnnnnnnnnnnnnnnnnnnnnnnnnnnnnnnnnnnnnnnnnnnnnnnnnnnnnnnnnnnnnnnnnnnnnnnnnnnnnnnnnnnnnnnnnnnnnnnnnnnnnnnnnnnnnnnnnnnnnnnnnnnnnnnnnnnnnnnnnnnnnnnnnnnnnnnnnnnnnnnnnnnnnnnnnnnnnnnnnnnnnnnnnnnnnnnnnnnnnnnnnnnnnnnnnnnnnnnnnnnnnnnnnnnnnnnnnnnnnnnnnnnnnnnnnnnnnnnnnnnnnnnnnnnnnnnnnnnnnnnnnnnnnnnnnnnnnnnnnnnnnnnnnnnnnnnnnnnnnnnnnnnnnnnnnnnnnnnnnnnnnnnnnnnnnnnnnnnnnnnnnnnnnnnnnnnnnnnnnnnnnnnnnnnnnnnnnnnnnnnnnnnnnnnnnnnnnnnnnnnnnnnnnnnnnnnnnnnnnnnnnnnnnnnnnnnnnnnnnnnnnnnnnnnnnnnnnnnnnnnnnnnnnnnnnnnnnnnnnnnnnnnnnnnnnnnnnnnnnnnnnnnnnnnnnnnnnnnnnnnnnnnnnnnnnnnnnnnnnnnnnnnnnnnnnnnnnnnnnnnnnnnnnnnnnnnnnnnnnnnnnnnnnnnnnnnnnnnnnnnnnnnnnnnnnnnnnnnnnnnnnnnnnnnnnnnnnnnnnnnnnnnnnnnnnnnnnnnnnnnnnnnnnnnnnnnnnnnnnnnnnnnnnnnnnnnnnnnnnnnnnnnnnnnnnnnnnnnnnnnnnnnnnnnnnnnnnnnnnnnnnnnnnnnnnnnnnnnnnnnnnnnnnnnnnnnnnnnnnnnnnnnnnnnnnnnnnnnnnnnnnnnnnnnnnnnnnnnnnnnnnnnnnnnnnnnnnnnnnnnnnnnnnnnnnnnnnnnnnnnnnnnnnnnnnnnnnnnnnnnnnnnnnnnnnnnnnnnnnnnnnnnnnnnnnnnnnnnnnnnnnnnnnnnnnnnnnnnnnnnnnnnnnnnnnnnnnnnnnnnnnnnnnnnnnnnnnnnnnnnnnnnnnnnnnnnnnnnnnnnnnnnnnnnnnnnnnnnnnnnnnnnnnnnnnnnnnnnnnnnnnnnnnnnnnnnnnnnnnnnnnnnnnnnnnnnnnnnnnnnnnnnnnnnnnnnnnnnnnnnnnnnnnnnnnnnnnnnnnnnnnnnnnnnnnnnnnnnnnnnnnnnnnnnnnnnnnnnnnnnnnnnnnnnnnnnnnnnnnnnnnnnnnnnnnnnnnnnnnnnnnnnnnnnnnnnnnnnnnnnnnnnnnnnnnnnnnnnnnnnnnnnnnnnnnnnnnnnnnnnnnnnnnnnnnnnnnnnnnnnnnnnnnnnnnnnnnnnnnnnnnnnnnnnnnnnnnnnnnnnnnnnnnnnnnnnnnnnnnnnnnnnnnnnnnnnnnnnnnnnnnnnnnnnnnnnnnnnnnnnnnnnnnnnnnnnnnnnnnnnnnnnnnnnnnnnnnnnnnnnnnnnnnnnnnnnnnnnnnnnnnnnnnnnnnnnnnnnnnnnnnnnnnnnnnnnnnnnnnnnnnnnnnnnnnnnnnnnnnnnnnnnnnnnnnnnnnnnnnnnnnnnnnnnnnnnnnnnnnnnnnnnnnnnnnnnnnnnnnnnnnnnnnnnnnnnnnnnnnnnnnnnnnnnnnnnnnnnnnnnnnnnnnnnnnnnnnnnnnnnnnnnnnnnnnnnnnnnnnnnnnnnnnnnnnnnnnnnnnnnnnnnnnnnnnnnnnnnnnnnnnnnnnnnnnnnnnnnnnnnnnnnnnnnnnnnnnnnnnnnnnnnnnnnnnnnnnnnnnnnnnnnnnnnnnnnnnnnnnnnnnnnnnnnnnnnnnnnnnnnnnnnnnnnnnnnnnnnnnnnnnnnnnnnnnnnnnnnnnnnnnnnnnnnnnnnnnnnnnnnnnnnnnnnnnnnnnnnnnnnnnnnnnnnnnnnnnnnnnnnnnnnnnnnnnnnnnnnnnnnnnnnnnnnnnnnnnnnnnnnnnnnnnnnnnnnnnnnnnnnnnnnnnnnnnnnnnnnnnnnnnnnnnnnnnnnnnnnnnnnnnnnnnnnnnnnnnnnnnnnnnnnnnnnnnnnnnnnnnnnnnnnnnnnnnnnnnnnnnnnnnnnnnnnnnnnnnnnnnnnnnnnnnnnnnnnnnnnnnnnnnnnnnnnnnnnnnnnnnnnnnnnnnnnnnnnnnnnnnnnnnnnnnnnnnnnnnnnnnnnnnnnnnnnnnnnnnnnnnnnnnnnnnnnnnnnnnnnnnnnnnnnnnnnnnnnnnnnnnnnnnnnnnnnnnnnnnnnnnnnnnnnnnnnnnnnnnnnnnnnnnnnnnnnnnnnnnnnnnnnnnnnnnnnnnnnnnnnnnnnnnnnnnnnnnnnnnnnnnnnnnnnnnnnnnnnnnnnnnnnnnnnnnnnnnnnnnnnnnnnnnnnnnnnnnnnnnnnnnnnnnnnnnnnnnnnnnnnnnnnnnnnnnnnnnnnnnnnnnnnnnnnnnnnnnnnnnnnnnnnnnnnnnnnnnnnnnnnnnnnnnnnnnnnnnnnnnnnnnnnnnnnnnnnnnnnnnnnnnnnnnnnnnnnnnnnnnnnnnnnnnnnnnnnnnnnnnnnnnnnnnnnnnnnnnnnnnnnnnnnnnnnnnnnnnnnnnnnnnnnnnnnnnnnnnnnnnnnnnnnnnnnnnnnnnnnnnnnnnnnnnnnnnnnnnnnnnnnnnnnnnnnnnnnnnnnnnnnnnnnnnnnnnnnnnnnnnnnnnnnnnnnnnnnnnnnnnnnnnnnnnnnnnnnnnnnnnnnnnnnnnnnnnnnnnnnnnnnnnnnnnnnnnnnnnnnnnnnnnnnnnnnnnnnnnnnnnnnnnnnnnnnnnnnnnnnnnnnnnnnnnnnnnnnnnnnnnnnnnnnnnnnnnnnnnnnnnnnnnnnnnnnnnnnnnnnnnnnnnnnnnnnnnnnnnnnnnnnnnnnnnnnnnnnnnnnnnnnnnnnnnnnnnnnnnnnnnnnnnnnnnnnnnnnnnnnnnnnnnnnnnnnnnnnnnnnnnnnnnnnnnnnnnnnnnnnnnnnnnnnnnnnnnnnnnnnnnnnnnnnnnnnnnnnnnnnnnnnnnnnnnnnnnnnnnnnnnnnnnnnnnnnnnnnnnnnnnnnnnnnnnnnnnnnnnnnnnnnnnnnnnnnnnnnnnnnnnnnnnnnnnnnnnnnnnnnnnnnnnnnnnnnnnnnnnnnnnnnnnnnnnnnnnnnnnnnnnnnnnnnnnnnnnnnnnnnnnnnnnnnnnnnnnnnnnnnnnnnnnnnnnnnnnnnnnnnnnnnnnnnnnnnnnnnnnnnnnnnnnnnnnnnnnnnnnnnnnnnnnnnnnnnnnnnnnnnnnnnnnnnnnnnnnnnnnnnnnnnnnnnnnnnnnnnnnnnnnnnnnnnnnnnnnnnnnnnnnnnnnnnnnnnnnnnnnnnnnnnnnnnnnnnnnnnnnnnnnnnnnnnnnnnnnnnnnnnnnnnnnnnnnnnnnnnnnnnnnnnnnnnnnnnnnnnnnnnnnnnnnnnnnnnnnnnnnnnnnnnnnnnnnnnnnnnnnnnnnnnnnnnnnnnnnnnnnnnnnnnnnnnnnnnnnnnnnnnnnnnnnnnnnnnnnnnnnnnnnnnnnnnnnnnnnnnnnnnnnnnnnnnnnnnnnnnnnnnnnnnnnnnnnnnnnnnnnnnnnnnnnnnnnnnnnnnnnnnnnnnnnnnnnnnnnnnnnnnnnnnnnnnnnnnnnnnnnnnnnnnnnnnnnnnnnnnnnnnnnnnnnnnnnnnnnnnnnnnnnnnnnnnnnnnnnnnnnnnnnnnnnnnnnnnnnnnnnnnnnnnnnnnnnnnnnnnnnnnnnnnnnnnnnnnnnnnnnnnnnnnnnnnnnnnnnnnnnnnnnnnnnnnnnnnnnnnnnnnnnnnnnnnnnnnnnnnnnnnnnnnnnnnnnnnnnnnnnnnnnnnnnnnnnnnnnnnnnnnnnnnnnnnnnnnnnnnnnnnnnnnnnnnnnnnnnnnnnnnnnnnnnnnnnnnnnnnnnnnnnnnnnnnnnnnnnnnnnnnnnnnnnnnnnnnnnnnnnnnnnnnnnnnnnnnnnnnnnnnnnnnnnnnnnnnnnnnnnnnnnnnnnnnnnnnnnnnnnnnnnnnnnnnnnnnnnnnnnnnnnnnnnnnnnnnnnnnnnnnnnnnnnnnnnnnnnnnnnnnnnnnnnnnnnnnnnnnnnnnnnnnnnnnnnnnnnnnnnnnnnnnnnnnnnnnnnnnnnnnnnnnnnnnnnnnnnnnnnnnnnnnnnnnnnnnnnnnnnnnnnnnnnnnnnnnnnnnnnnnnnnnnnnnnnnnnnnnnnnnnnnnnnnnnnnnnnnnnnnnnnnnnnnnnnnnnnnnnnnnnnnnnnnnnnnnnnnnnnnnnnnnnnnnnnnnnnnnnnnnnnnnnnnnnnnnnnnnnnnnnnnnnnnnnnnnnnnnnnnnnnnnnnnnnnnnnnnnnnnnnnnnnnnnnnnnnnnnnnnnnnnnnnnnnnnnnnnnnnnnnnnnnnnnnnnnnnnnnnnnnnnnnnnnnnnnnnnnnnnnnnnnnnnnnnnnnnnnnnnnnnnnnnnnnnnnnnnnnnnnnnnnnnnnnnnnnnnnnnnnnnnnnnnnnnnnnnnnnnnnnnnnnnnnnnnnnnnnnnnnnnnnnnnnnnnnnnnnnnnnnnnnnnnnnnnnnnnnnnnnnnnnnnnnnnnnnnnnnnnnnnnnnnnnnnnnnnnnnnnnnnnnnnnnnnnnnnnnnnnnnnnnnnnnnnnnnnnnnnnnnnnnnnnnnnnnnnnnnnnnnnnnnnnnnnnnnnnnnnnnnnnnnnnnnnnnnnnnnnnnnnnnnnnnnnnnnnnnnnnnnnnnnnnnnnnnnnnnnnnnnnnnnnnnnnnnnnnnnnnnnnnnnnnnnnnnnnnnnnnnnnnnnnnnnnnnnnnnnnnnnnnnnnnnnnnnnnnnnnnnnnnnnnnnnnnnnnnnnnnnnnnnnnnnnnnnnnnnnnnnnnnnnnnnnnnnnnnnnnnnnnnnnnnnnnnnnnnnnnnnnnnnnnnnnnnnnnnnnnnnnnnnnnnnnnnnnnnnnnnnnnnnnnnnnnnnnnnnnnnnnnnnnnnnnnnnnnnnnnnnnnnnnnnnnnnnnnnnnnnnnnnnnnnnnnnnnnnnnnnnnnnnnnnnnnnnnnnnnnnnnnnnnnnnnnnnnnnnnnnnnnnnnnnnnnnnnnnnnnnnnnnnnnnnnnnnnnnnnnnnnnnnnnnnnnnnnnnnnnnnnnnnnnnnnnnnnnnnnnnnnnnnnnnnnnnnnnnnnnnnnnnnnnnnnnnnnnnnnnnnnnnnnnnnnnnnnnnnnnnnnnnnnnnnnnnnnnnnnnnnnnnnnnnnnnnnnnnnnnnnnnnnnnnnnnnnnnnnnnnnnnnnnnnnnnnnnnnnnnnnnnnnnnnnnnnnnnnnnnnnnnnnnnnnnnnnnnnnnnnnnnnnnnnnnnnnnnnnnnnnnnnnnnnnnnnnnnnnnnnnnnnnnnnnnnnnnnnnnnnnnnnnnnnnnnnnnnnnnnnnnnnnnnnnnnnnnnnnnnnnnnnnnnnnnnnnnnnnnnnnnnnnnnnnnnnnnnnnnnnnnnnnnnnnnnnnnnnnnnnnnnnnnnnnnnnnnnnnnnnnnnnnnnnnnnnnnnnnnnnnnnnnnnnnnnnnnnnnnnnnnnnnnnnnnnnnnnnnnnnnnnnnnnnnnnnnnnnnnnnnnnnnnnnnnnnnnnnnnnnnnnnnnnnnnnnnnnnnnnnnnnnnnnnnnnnnnnnnnnnnnnnnnnnnnnnnnnnnnnnnnnnnnnnnnnnnnnnnnnnnnnnnnnnnnnnnnnnnnnnnnnnnnnnnnnnnnnnnnnnnnnnnnnnnnnnnnnnnnnnnnnnnnnnnnnnnnnnnnnnnnnnnnnnnnnnnnnnnnnnnnnnnnnnnnnnnnnnnnnnnnnnnnnnnnnnnnnnnnnnnnnnnnnnnnnnnnnnnnnnnnnnnnnnnnnnnnnnnnnnnnnnnnnnnnnnnnnnnnnnnnnnnnnnnnnnnnnnnnnnnnnnnnnnnnnnnnnnnnnnnnnnnnnnnnnnnnnnnnnnnnnnnnnnnnnnnnnnnnnnnnnnnnnnnnnnnnnnnnnnnnnnnnnnnnnnnnnnnnnnnnnnnnnnnnnnnnnnnnnnnnnnnnnnnnnnnnnnnnnnnnnnnnnnnnnnnnnnnnnnnnnnnnnnnnnnnnnnnnnnnnnnnnnnnnnnnnnnnnnnnnnnnnnnnnnnnnnnnnnnnnnnnnnnnnnnnnnnnnnnnnnnnnnnnnnnnnnnnnnnnnnnnnnnnnnnnnnnnnnnnnnnnnnnnnnnnnnnnnnnnnnnnnnnnnnnnnnnnnnnnnnnnnnnnnnnnnnnnnnnnnnnnnnnnnnnnnnnnnnnnnnnnnnnnnnnnnnnnnnnnnnnnnnnnnnnnnnnnnnnnnnnnnnnnnnnnnnnnnnnnnnnnnnnnnnnnnnnnnnnnnnnnnnnnnnnnnnnnnnnnnnnnnnnnnnnnnnnnnnnnnnnnnnnnnnnnnnnnnnnnnnnnnnnnnnnnnnnnnnnnnnnnnnnnnnnnnnnnnnnnnnnnnnnnnnnnnnnnnnnnnnnnnnnnnnnnnnnnnnnnnnnnnnnnnnnnnnnnnnnnnnnnnnnnnnnnnnnnnnnnnnnnnnnnnnnnnnnnnnnnnnnnnnnnnnnnnnnnnnnnnnnnnnnnnnnnnnnnnnnnnnnnnnnnnnnnnnnnnnnnnnnnnnnnnnnnnnnnnnnnnnnnnnnnnnnnnnnnnnnnnnnnnnnnnnnnnnnnnnnnnnnnnnnnnnnnnnnnnnnnnnnnnnnnnnnnnnnnnnnnnnnnnnnnnnnnnnnnnnnnnnnnnnnnnnnnnnnnnnnnnnnnnnnnnnnnnnnnnnnnnnnnnnnnnnnnnnnnnnnnnnnnnnnnnnnnnnnnnnnnnnnnnnnnnnnnnnnnnnnnnnnnnnnnnnnnnnnnnnnnnnnnnnnnnnnnnnnnnnnnnnnnnnnnnnnnnnnnnnnnnnnnnnnnnnnnnnnnnnnnnnnnnnnnnnnnnnnnnnnnnnnnnnnnnnnnnnnnnnnnnnnnnnnnnnnnnnnnnnnnnnnnnnnnnnnnnnnnnnnnnnnnnnnnnnnnnnnnnnnnnnnnnnnnnnnnnnnnnnnnnnnnnnnnnnnnnnnnnnnnnnnnnnnnnnnnnnnnnnnnnnnnnnnnnnnnnnnnnnnnnnnnnnnnnnnnnnnnnnnnnnnnnnnnnnnnnnnnnnnnnnnnnnnnnnnnnnnnnnnnnnnnnnnnnnnnnnnnnnnnnnnnnnnnnnnnnnnnnnnnnnnnnnnnnnnnnnnnnnnnnnnnnnnnnnnnnnnnnnnnnnnnnnnnnnnnnnnnnnnnnnnnnnnnnnnnnnnnnnnnnnnnnnnnnnnnnnnnnnnnnnnnnnnnnnnnnnnnnnnnnnnnnnnnnnnnnnnnnnnnnnnnnnnnnnnnnnnnnnnnnnnnnnnnnnnnnnnnnnnnnnnnnnnnnnnnnnnnnnnnnnnnnnnnnnnnnnnnnnnnnnnnnnnnnnnnnnnnnnnnnnnnnnnnnnnnnnnnnnnnnnnnnnnnnnnnnnnnnnnnnnnnnnnnnnnnnnnnnnnnnnnnnnnnnnnnnnnnnnnnnnnnnnnnnnnnnnnnnnnnnnnnnnnnnnnnnnnnnnnnnnnnnnnnnnnnnnnnnnnnnnnnnnnnnnnnnnnnnnnnnnnnnnnnnnnnnnnnnnnnnnnnnnnnnnnnnnnnnnnnnnnnnnnnnnnnnnnnnnnnnnnnnnnnnnnnnnnnnnnnnnnnnnnnnnnnnnnnnnnnnnnnnnnnnnnnnnnnnnnnnnnnnnnnnnnnnnnnnnnnnnnnnnnnnnnnnnnnnnnnnnnnnnnnnnnnnnnnnnnnnnnnnnnnnnnnnnnnnnnnnnnnnnnnnnnnnnnnnnnnnnnnnnnnnnnnnnnnnnnnnnnnnnnnnnnnnnnnnnnnnnnnnnnnnnnnnnnnnnnnnnnnnnnnnnnnnnnnnnnnnnnnnnnnnnnnnnnnnnnnnnnnnnnnnnnnnnnnnnnnnnnnnnnnnnnnnnnnnnnnnnnnnnnnnnnnnnnnnnnnnnnnnnnnnnnnnnnnnnnnnnnnnnnnnnnnnnnnnnnnnnnnnnnnnnnnnnnnnnnnnnnnnnnnnnnnnnnnnnnnnnnnnnnnnnnnnnnnnnnnnnnnnnnnnnnnnnnnnnnnnnnnnnnnnnnnnnnnnnnnnnnnnnnnnnnnnnnnnnnnnnnnnnnnnnnnnnnnnnnnnnnnnnnnnnnnnnnnnnnnnnnnnnnnnnnnnnnnnnnnnnnnnnnnnnnnnnnnnnnnnnnnnnnnnnnnnnnnnnnnnnnnnnnnnnnnnnnnnnnnnnnnnnnnnnnnnnnnnnnnnnnnnnnnnnnnnnnnnnnnnnnnnnnnnnnnnnnnnnnnnnnnnnnnnnnnnnnnnnnnnnnnnnnnnnnnnnnnnnnnnnnnnnnnnnnnnnnnnnnnnnnnnnnnnnnnnnnnnnnnnnnnnnnnnnnnnnnnnnnnnnnnnnnnnnnnnnnnnnnnnnnnnnnnnnnnnnnnnnnnnnnnnnnnnnnnnnnnnnnnnnnnnnnnnnnnnnnnnnnnnnnnnnnnnnnnnnnnnnnnnnnnnnnnnnnnnnnnnnnnnnnnnnnnnnnnnnnnnnnnnnnnnnnnnnnnnnnnnnnnnnnnnnnnnnnnnnnnnnnnnnnnnnnnnnnnnnnnnnnnnnnnnnnnnnnnnnnnnnnnnnnnnnnnnnnnnnnnnnnnnnnnnnnnnnnnnnnnnnnnnnnnnnnnnnnnnnnnnnnnnnnnnnnnnnnnnnnnnnnnnnnnnnnnnnnnnnnnnnnnnnnnnnnnnnnnnnnnnnnnnnnnnnnnnnnnnnnnnnnnnnnnnnnnnnnnnnnnnnnnnnnnnnnnnnnnnnnnnnnnnnnnnnnnnnnnnnnnnnnnnnnnnnnnnnnnnnnnnnnnnnnnnnnnnnnnnnnnnnnnnnnnnnnnnnnnnnnnnnnnnnnnnnnnnnnnnnnnnnnnnnnnnnnnnnnnnnnnnnnnnnnnnnnnnnnnnnnnnnnnnnnnnnnnnnnnnnnnnnnnnnnnnnnnnnnnnnnnnnnnnnnnnnnnnnnnnnnnnnnnnnnnnnnnnnnnnnnnnnnnnnnnnnnnnnnnnnnnnnnnnnnnnnnnnnnnnnnnnnnnnnnnnnnnnnnnnnnnnnnnnnnnnnnnnnnnnnnnnnnnnnnnnnnnnnnnnnnnnnnnnnnnnnnnnnnnnnnnnnnnnnnnnnnnnnnnnnnnnnnnnnnnnnnnnnnnnnnnnnnnnnnnnnnnnnnnnnnnnnnnnnnnnnnnnnnnnnnnnnnnnnnnnnnnnnnnnnnnnnnnnnnnnnnnnnnnnnnnnnnnnnnnnnnnnnnnnnnnnnnnnnnnnnnnnnnnnnnnnnnnnnnnnnnnnnnnnnnnnnnnnnnnnnnnnnnnnnnnnnnnnnnnnnnnnnnnnnnnnnnnnnnnnnnnnnnnnnnnnnnnnnnnnnnnnnnnnnnnnnnnnnnnnnnnnnnnnnnnnnnnnnnnnnnnnnnnnnnnnnnnnnnnnnnnnnnnnnnnnnnnnnnnnnnnnnnnnnnnnnnnnnnnnnnnnnnnnnnnnnnnnnnnnnnnnnnnnnnnnnnnnnnnnnnnnnnnnnnnnnnnnnnnnnnnnnnnnnnnnnnnnnnnnnnnnnnnnnnnnnnnnnnnnnnnnnnnnnnnnnnnnnnnnnnnnnnnnnnnnnnnnnnnnnnnnnnnnnnnnnnnnnnnnnnnnnnnnnnnnnnnnnnnnnnnnnnnnnnnnnnnnnnnnnnnnnnnnnnnnnnnnnnnnnnnnnnnnnnnnnnnnnnnnnnnnnnnnnnnnnnnnnnnnnnnnnnnnnnnnnnnnnnnnnnnnnnnnnnnnnnnnnnnnnnnnnnnnnnnnnnnnnnnnnnnnnnnnnnnnnnnnnnnnnnnnnnnnnnnnnnnnnnnnnnnnnnnnnnnnnnnnnnnnnnnnnnnnnnnnnnnnnnnnnnnnnnnnnnnnnnnnnnnnnnnnnnnnnnnnnnnnnnnnnnnnnnnnnnnnnnnnnnnnnnnnnnnnnnnnnnnnnnnnnnnnnnnnnnnnnnnnnnnnnnnnnnnnnnnnnnnnnnnnnnnnnnnnnnnnnnnnnnnnnnnnnnnnnnnnnnnnnnnnnnnnnnnnnnnnnnnnnnnnnnnnnnnnnnnnnnnnnnnnnnnnnnnnnnnnnnnnnnnnnnnnnnnnnnnnnnnnnnnnnnnnnnnnnnnnnnnnnnnnnnnnnnnnnnnnnnnnnnnnnnnnnnnnnnnnnnnnnnnnnnnnnnnnnnnnnnnnnnnnnnnnnnnnnnnnnnnnnnnnnnnnnnnnnnnnnnnnnnnnnnnnnnnnnnnnnnnnnnnnnnnnnnnnnnnnnnnnnnnnnnnnnnnnnnnnnnnnnnnnnnnnnnnnnnnnnnnnnnnnnnnnnnnnnnnnnnnnnnnnnnnnnnnnnnnnnnnnnnnnnnnnnnnnnnnnnnnnnnnnnnnnnnnnnnnnnnnnnnnnnnnnnnnnnnnnnnnnnnnnnnnnnnnnnnnnnnnnnnnnnnnnnnnnnnnnnnnnnnnnnnnnnnnnnnnnnnnnnnnnnnnnnnnnnnnnnnnnnnnnnnnnnnnnnnnnnnnnnnnnnnnnnnnnnnnnnnnnnnnnnnnnnnnnnnnnnnnnnnnnnnnnnnnnnnnnnnnnnnnnnnnnnnnnnnnnnnnnnnnnnnnnnnnnnnnnnnnnnnnnnnnnnnnnnnnnnnnnnnnnnnnnnnnnnnnnnnnnnnnnnnnnnnnnnnnnnnnnnnnnnnnnnnnnnnnnnnnnnnnnnnnnnnnnnnnnnnnnnnnnnnnnnnnnnnnnnnnnnnnnnnnnnnnnnnnnnnnnnnnnnnnnnnnnnnnnnnnnnnnnnnnnnnnnnnnnnnnnnnnnnnnnnnnnnnnnnnnnnnnnnnnnnnnnnnnnnnnnnnnnnnnnnnnnnnnnnnnnnnnnnnnnnnnnnnnnnnnnnnnnnnnnnnnnnnnnnnnnnnnnnnnnnnnnnnnnnnnnnnnnnnnnnnnnnnnnnnnnnnnnnnnnnnnnnnnnnnnnnnnnnnnnnnnnnnnnnnnnnnnnnnnnnnnnnnnnnnnnnnnnnnnnnnnnnnnnnnnnnnnnnnnnnnnnnnnnnnnnnnnnnnnnnnnnnnnnnnnnnnnnnnnnnnnnnnnnnnnnnnnnnnnnnnnnnnnnnnnnnnnnnnnnnnnnnnnnnnnnnnnnnnnnnnnnnnnnnnnnnnnnnnnnnnnnnnnnnnnnnnnnnnnnnnnnnnnnnnnnnnnnnnnnnnnnnnnnnnnnnnnnnnnnnnnnnnnnnnnnnnnnnnnnnnnnnnnnnnnnnnnnnnnnnnnnnnnnnnnnnnnnnnnnnnnnnnnnnnnnnnnnnnnnnnnnnnnnnnnnnnnnnnnnnnnnnnnnnnnnnnnnnnnnnnnnnnnnnnnnnnnnnnnnnnnnnnnnnnnnnnnnnnnnnnnnnnnnnnnnnnnnnnnnnnnnnnnnnnnnnnnnnnnnnnnnnnnnnnnnnnnnnnnnnnnnnnnnnnnnnnnnnnnnnnnnnnnnnnnnnnnnnnnnnnnnnnnnnnnnnnnnnnnnnnnnnnnnnnnnnnnnnnnnnnnnnnnnnnnnnnnnnnnnnnnnnnnnnnnnnnnnnnnnnnnnnnnnnnnnnnnnnnnnnnnnnnnnnnnnnnnnnnnnnnnnnnnnnnnnnnnnnnnnnnnnnnnnnnnnnnnnnnnnnnnnnnnnnnnnnnnnnnnnnnnnnnnnnnnnnnnnnnnnnnnnnnnnnnnnnnnnnnnnnnnnnnnnnnnnnnnnnnnnnnnnnnnnnnnnnnnnnnnnnnnnnnnnnnnnnnnnnnnnnnnnnnnnnnnnnnnnnnnnnnnnnnnnnnnnnnnnnnnnnnnnnnnnnnnnnnnnnnnnnnnnnnnnnnnnnnnnnnnnnnnnnnnnnnnnnnnnnnnnnnnnnnnnnnnnnnnnnnnnnnnnnnnnnnnnnnnnnnnnnnnnnnnnnnnnnnnnnnnnnnnnnnnnnnnnnnnnnnnnnnnnnnnnnnnnnnnnnnnnnnnnnnnnnnnnnnnnnnnnnnnnnnnnnnnnnnnnnnnnnnnnnnnnnnnnnnnnnnnnnnnnnnnnnnnnnnnnnnnnnnnnnnnnnnnnnnnnnnnnnnnnnnnnnnnnnnnnnnnnnnnnnnnnnnnnnnnnnnnnnnnnnnnnnnnnnnnnnnnnnnnnnnnnnnnnnnnnnnnnnnnnnnnnnnnnnnnnnnnnnnnnnnnnnnnnnnnnnnnnnnnnnnnnnnnnnnnnnnnnnnnnnnnnnnnnnnnnnnnnnnnnnnnnnnnnnnnnnnnnnnnnnnnnnnnnnnnnnnnnnnnnnnnnnnnnnnnnnnnnnnnnnnnnnnnnnnnnnnnnnnnnnnnnnnnnnnnnnnnnnnnnnnnnnnnnnnnnnnnnnnnnnnnnnnnnnnnnnnnnnnnnnnnnnnnnnnnnnnnnnnnnnnnnnnnnnnnnnnnnnnnnnnnnnnnnnnnnnnnnnnnnnnnnnnnnnnnnnnnnnnnnnnnnnnnnnnnnnnnnnnnnnnnnnnnnnnnnnnnnnnnnnnnnnnnnnnnnnnnnnnnnnnnnnnnnnnnnnnnnnnnnnnnnnnnnnnnnnnnnnnnnnnnnnnnnnnnnnnnnnnnnnnnnnnnnnnnnnnnnnnnnnnnnnnnnnnnnnnnnnnnnnnnnnnnnnnnnnnnnnnnnnnnnnnnnnnnnnnnnnnnnnnnnnnnnnnnnnnnnnnnnnnnnnnnnnnnnnnnnnnnnnnnnnnnnnnnnnnnnnnnnnnnnnnnnnnnnnnnnnnnnnnnnnnnnnnnnnnnnnnnnnnnnnnnnnnnnnnnnnnnnnnnnnnnnnnnnnnnnnnnnnnnnnnnnnnnnnnnnnnnnnnnnnnnnnnnnnnnnnnnnnnnnnnnnnnnnnnnnnnnnnnnnnnnnnnnnnnnnnnnnnnnnnnnnnnnnnnnnnnnnnnnnnnnnnnnnnnnnnnnnnnnnnnnnnnnnnnnnnnnnnnnnnnnnnnnnnnnnnnnnnnnnnnnnnnnnnnnnnnnnnnnnnnnnnnnnnnnnnnnnnnnnnnnnnnnnnnnnnnnnnnnnnnnnnnnnnnnnnnnnnnnnnnnnnnnnnnnnnnnnnnnnnnnnnnnnnnnnnnnnnnnnnnnnnnnnnnnnnnnnnnnnnnnnnnnnnnnnnnnnnnnnnnnnnnnnnnnnnnnnnnnnnnnnnnnnnnnnnnnnnnnnnnnnnnnnnnnnnnnnnnnnnnnnnnnnnnnnnnnnnnnnnnnnnnnnnnnnnnnnnnnnnnnnnnnnnnnnnnnnnnnnnnnnnnnnnnnnnnnnnnnnnnnnnnnnnnnnnnnnnnnnnnnnnnnnnnnnnnnnnnnnnnnnnnnnnnnnnnnnnnnnnnnnnnnnnnnnnnnnnnnnnnnnnnnnnnnnnnnnnnnnnnnnnnnnnnnnnnnnnnnnnnnnnnnnnnnnnnnnnnnnnnnnnnnnnnnnnnnnnnnnnnnnnnnnnnnnnnnnnnnnnnnnnnnnnnnnnnnnnnnnnnnnnnnnnnnnnnnnnnnnnnnnnnnnnnnnnnnnnnnnnnnnnnnnnnnnnnnnnnnnnnnnnnnnnnnnnnnnnnnnnnnnnnnnnnnnnnnnnnnnnnnnnnnnnnnnnnnnnnnnnnnnnnnnnnnnnnnnnnnnnnnnnnnnnnnnnnnnnnnnnnnnnnnnnnnnnnnnnnnnnnnnnnnnnnnnnnnnnnnnnnnnnnnnnnnnnnnnnnnnnnnnnnnnnnnnnnnnnnnnnnnnnnnnnnnnnnnnnnnnnnnnnnnnnnnnnnnnnnnnnnnnnnnnnnnnnnnnnnnnnnnnnnnnnnnnnnnnnnnnnnnnnnnnnnnnnnnnnnnnnnnnnnnnnnnnnnnnnnnnnnnnnnnnnnnnnnnnnnnnnnnnnnnnnnnnnnnnnnnnnnnnnnnnnnnnnnnnnnnnnnnnnnnnnnnnnnnnnnnnnnnnnnnnnnnnnnnnnnnnnnnnnnnnnnnnnnnnnnnnnnnnnnnnnnnnnnnnnnnnnnnnnnnnnnnnnnnnnnnnnnnnnnnnnnnnnnnnnnnnnnnnnnnnnnnnnnnnnnnnnnnnnnnnnnnnnnnnnnnnnnnnnnnnnnnnnnnnnnnnnnnnnnnnnnnnnnnnnnnnnnnnnnnnnnnnnnnnnnnnnnnnnnnnnnnnnnnnnnnnnnnnnnnnnnnnnnnnnnnnnnnnnnnnnnnnnnnnnnnnnnnnnnnnnnnnnnnnnnnnnnnnnnnnnnnnnnnnnnnnnnnnnnnnnnnnnnnnnnnnnnnnnnnnnnnnnnnnnnnnnnnnnnnnnnnnnnnnnnnnnnnnnnnnnnnnnnnnnnnnnnnnnnnnnnnnnnnnnnnnnnnnnnnnnnnnnnnnnnnnnnnnnnnnnnnnnnnnnnnnnnnnnnnnnnnnnnnnnnnnnnnnnnnnnnnnnnnnnnnnnnnnnnnnnnnnnnnnnnnnnnnnnnnnnnnnnnnnnnnnnnnnnnnnnnnnnnnnnnnnnnnnnnnnnnnnnnnnnnnnnnnnnnnnnnnnnnnnnnnnnnnnnnnnnnnnnnnnnnnnnnnnnnnnnnnnnnnnnnnnnnnnnnnnnnnnnnnnnnnnnnnnnnnnnnnnnnnnnnnnnnnnnnnnnnnnnnnnnnnnnnnnnnnnnnnnnnnnnnnnnnnnnnnnnnnnnnnnnnnnnnnnnnnnnnnnnnnnnnnnnnnnnnnnnnnnnnnnnnnnnnnnnnnnnnnnnnnnnnnnnnnnnnnnnnnnnnnnnnnnnnnnnnnnnnnnnnnnnnnnnnnnnnnnnnnnnnnnnnnnnnnnnnnnnnnnnnnnnnnnnnnnnnnnnnnnnnnnnnnnnnnnnnnnnnnnnnnnnnnnnnnnnnnnnnnnnnnnnnnnnnnnnnnnnnnnnnnnnnnnnnnnnnnnnnnnnnnnnnnnnnnnnnnnnnnnnnnnnnnnnnnnnnnnnnnnnnnnnnnnnnnnnnnnnnnnnnnnnnnnnnnnnnnnnnnnnnnnnnnnnnnnnnnnnnnnnnnnnnnnnnnnnnnnnnnnnnnnnnnnnnnnnnnnnnnnnnnnnnnnnnnnnnnnnnnnnnnnnnnnnnnnnnnnnnnnnnnnnnnnnnnnnnnnnnnnnnnnnnnnnnnnnnnnnnnnnnnnnnnnnnnnnnnnnnnnnnnnnnnnnnnnnnnnnnnnnnnnnnnnnnnnnnnnnnnnnnnnnnnnnnnnnnnnnnnnnnnnnnnnnnnnnnnnnnnnnnnnnnnnnnnnnnnnnnnnnnnnnnnnnnnnnnnnnnnnnnnnnnnnnnnnnnnnnnnnnnnnnnnnnnnnnnnnnnnnnnnnnnnnnnnnnnnnnnnnnnnnnnnnnnnnnnnnnnnnnnnnnnnnnnnnnnnnnnnnnnnnnnnnnnnnnnnnnnnnnnnnnnnnnnnnnnnnnnnnnnnnnnnnnnnnnnnnnnnnnnnnnnnnnnnnnnnnnnnnnnnnnnnnnnnnnnnnnnnnnnnnnnnnnnnnnnnnnnnnnnnnnnnnnnnnnnnnnnnnnnnnnnnnnnnnnnnnnnnnnnnnnnnnnnnnnnnnnnnnnnnnnnnnnnnnnnnnnnnnnnnnnnnnnnnnnnnnnnnnnnnnnnnnnnnnnnnnnnnnnnnnnnnnnnnnnnnnnnnnnnnnnnnnnnnnnnnnnnnnnnnnnnnnnnnnnnnnnnnnnnnnnnnnnnnnnnnnnnnnnnnnnnnnnnnnnnnnnnnnnnnnnnnnnnnnnnnnnnnnnnnnnnnnnnnnnnnnnnnnnnnnnnnnnnnnnnnnnnnnnnnnnnnnnnnnnnnnnnnnnnnnnnnnnnnnnnnnnnnnnnnnnnnnnnnnnnnnnnnnnnnnnnnnnnnnnnnnnnnnnnnnnnnnnnnnnnnnnnnnnnnnnnnnnnnnnnnnnnnnnnnnnnnnnnnnnnnnnnnnnnnnnnnnnnnnnnnnnnnnnnnnnnnnnnnnnnnnnnnnnnnnnnnnnnnnnnnnnnnnnnnnnnnnnnnnnnnnnnnnnnnnnnnnnnnnnnnnnnnnnnnnnnnnnnnnnnnnnnnnnnnnnnnnnnnnnnnnnnnnnnnnnnnnnnnnnnnnnnnnnnnnnnnnnnnnnnnnnnnnnnnnnnnnnnnnnnnnnnnnnnnnnnnnnnnnnnnnnnnnnnnnnnnnnnnnnnnnnnnnnnnnnnnnnnnnnnnnnnnnnnnnnnnnnnnnnnnnnnnnnnnnnnnnnnnnnnnnnnnnnnnnnnnnnnnnnnnnnnnnnnnnnnnnnnnnnnnnnnnnnnnnnnnnnnnnnnnnnnnnnnnnnnnnnnnnnnnnnnnnnnnnnnnnnnnnnnnnnnnnnnnnnnnnnnnnnnnnnnnnnnnnnnnnnnnnnnnnnnnnnnnnnnnnnnnnnnnnnnnnnnnnnnnnnnnnnnnnnnnnnnnnnnnnnnnnnnnnnnnnnnnnnnnnnnnnnnnnnnnnnnnnnnnnnnnnnnnnnnnnnnnnnnnnnnnnnnnnnnnnnnnnnnnnnnnnnnnnnnnnnnnnnnnnnnnnnnnnnnnnnnnnnnnnnnnnnnnnnnnnnnnnnnnnnnnnnnnnnnnnnnnnnnnnnnnnnnnnnnnnnnnnnnnnnnnnnnnnnnnnnnnnnnnnnnnnnnnnnnnnnnnnnnnnnnnnnnnnnnnnnnnnnnnnnnnnnnnnnnnnnnnnnnnnnnnnnnnnnnnnnnnnnnnnnnnnnnnnnnnnnnnnnnnnnnnnnnnnnnnnnnnnnnnnnnnnnnnnnnnnnnnnnnnnnnnnnnnnnnnnnnnnnnnnnnnnnnnnnnnnnnnnnnnnnnnnnnnnnnnnnnnnnnnnnnnnnnnnnnnnnnnnnnnnnnnnnnnnnnnnnnnnnnnnnnnnnnnnnnnnnnnnnnnnnnnnnnnnnnnnnnnnnnnnnnnnnnnnnnnnnnnnnnnnnnnnnnnnnnnnnnnnnnnnnnnnnnnnnnnnnnnnnnnnnnnnnnnnnnnnnnnnnnnnnnnnnnnnnnnnnnnnnnnnnnnnnnnnnnnnnnnnnnnnnnnnnnnnnnnnnnnnnnnnnnnnnnnnnnnnnnnnnnnnnnnnnnnnnnnnnnnnnnnnnnnnnnnnnnnnnnnnnnnnnnnnnnnnnnnnnnnnnnnnnnnnnnnnnnnnnnnnnnnnnnnnnnnnnnnnnnnnnnnnnnnnnnnnnnnnnnnnnnnnnnnnnnnnnnnnnnnnnnnnnnnnnnnnnnnnnnnnnnnnnnnnnnnnnnnnnnnnnnnnnnnnnnnnnnnnnnnnnnnnnnnnnnnnnnnnnnnnnnnnnnnnnnnnnnnnnnnnnnnnnnnnnnnnnnnnnnnnnnnnnnnnnnnnnnnnnnnnnnnnnnnnnnnnnnnnnnnnnnnnnnnnnnnnnnnnnnnnnnnnnnnnnnnnnnnnnnnnnnnnnnnnnnnnnnnnnnnnnnnnnnnnnnnnnnnnnnnnnnnnnnnnnnnnnnnnnnnnnnnnnnnnnnnnnnnnnnnnnnnnnnnnnnnnnnnnnnnnnnnnnnnnnnnnnnnnnnnnnnnnnnnnnnnnnnnnnnnnnnnnnnnnnnnnnnnnnnnnnnnnnnnnnnnnnnnnnnnnnnnnnnnnnnnnnnnnnnnnnnnnnnnnnnnnnnnnnnnnnnnnnnnnnnnnnnnnnnnnnnnnnnnnnnnnnnnnnnnnnnnnnnnnnnnnnnnnnnnnnnnnnnnnnnnnnnnnnnnnnnnnnnnnnnnnnnnnnnnnnnnnnnnnnnnnnnnnnnnnnnnnnnnnnnnnnnnnnnnnnnnnnnnnnnnnnnnnnnnnnnnnnnnnnnnnnnnnnnnnnnnnnnnnnnnnnnnnnnnnnnnnnnnnnnnnnnnnnnnnnnnnnnnnnnnnnnnnnnnnnnnnnnnnnnnnnnnnnnnnnnnnnnnnnnnnnnnnnnnnnnnnnnnnnnnnnnnnnnnnnnnnnnnnnnnnnnnnnnnnnnnnnnnnnnnnnnnnnnnnnnnnnnnnnnnnnnnnnnnnnnnnnnnnnnnnnnnnnnnnnnnnnnnnnnnnnnnnnnnnnnnnnnnnnnnnnnnnnnnnnnnnnnnnnnnnnnnnnnnnnnnnnnnnnnnnnnnnnnnnnnnnnnnnnnnnnnnnnnnnnnnnnnnnnnnnnnnnnnnnnnnnnnnnnnnnnnnnnnnnnnnnnnnnnnnnnnnnnnnnnnnnnnnnnnnnnnnnnnnnnnnnnnnnnnnnnnnnnnnnnnnnnnnnnnnnnnnnnnnnnnnnnnnnnnnnnnnnnnnnnnnnnnnnnnnnnnnnnnnnnnnnnnnnnnnnnnnnnnnnnnnnnnnnnnnnnnnnnnnnnnnnnnnnnnnnnnnnnnnnnnnnnnnnnnnnnnnnnnnnnnnnnnnnnnnnnnnnnnnnnnnnnnnnnnnnnnnnnnnnnnnnnnnnnnnnnnnnnnnnnnnnnnnnnnnnnnnnnnnnnnnnnnnnnnnnnnnnnnnnnnnnnnnnnnnnnnnnnnnnnnnnnnnnnnnnnnnnnnnnnnnnnnnnnnnnnnnnnnnnnnnnnnnnnnnnnnnnnnnnnnnnnnnnnnnnnnnnnnnnnnnnnnnnnnnnnnnnnnnnnnnnnnnnnnnnnnnnnnnnnnnnnnnnnnnnnnnnnnnnnnnnnnnnnnnnnnnnnnnnnnnnnnnnnnnnnnnnnnnnnnnnnnnnnnnnnnnnnnnnnnnnnnnnnnnnnnnnnnnnnnnnnnnnnnnnnnnnnnnnnnnnnnnnnnnnnnnnnnnnnnnnnnnnnnnnnnnnnnnnnnnnnnnnnnnnnnnnnnnnnnnnnnnnnnnnnnnnnnnnnnnnnnnnnnnnnnnnnnnnnnnnnnnnnnnnnnnnnnnnnnnnnnnnnnnnnnnnnnnnnnnnnnnnnnnnnnnnnnnnnnnnnnnnnnnnnnnnnnnnnnnnnnnnnnnnnnnnnnnnnnnnnnnnnnnnnnnnnnnnnnnnnnnnnnnnnnnnnnnnnnnnnnnnnnnnnnnnnnnnnnnnnnnnnnnnnnnnnnnnnnnnnnnnnnnnnnnnnnnnnnnnnnnnnnnnnnnnnnnnnnnnnnnnnnnnnnnnnnnnnnnnnnnnnnnnnnnnnnnnnnnnnnnnnnnnnnnnnnnnnnnnnnnnnnnnnnnnnnnnnnnnnnnnnnnnnnnnnnnnnnnnnnnnnnnnnnnnnnnnnnnnnnnnnnnnnnnnnnnnnnnnnnnnnnnnnnnnnnnnnnnnnnnnnnnnnnnnnnnnnnnnnnnnnnnnnnnnnnnnnnnnnnnnnnnnnnnnnnnnnnnnnnnnnnnnnnnnnnnnnnnnnnnnnnnnnnnnnnnnnnnnnnnnnnnnnnnnnnnnnnnnnnnnnnnnnnnnnnnnnnnnnnnnnnnnnnnnnnnnnnnnnnnnnnnnnnnnnnnnnnnnnnnnnnnnnnnnnnnnnnnnnnnnnnnnnnnnnnnnnnnnnnnnnnnnnnnnnnnnnnnnnnnnnnnnnnnnnnnnnnnnnnnnnnnnnnnnnnnnnnnnnnnnnnnnnnnnnnnnnnnnnnnnnnnnnnnnnnnnnnnnnnnnnnnnnnnnnnnnnnnnnnnnnnnnnnnnnnnnnnnnnnnnnnnnnnnnnnnnnnnnnnnnnnnnnnnnnnnnnnnnnnnnnnnnnnnnnnnnnnnnnnnnnnnnnnnnnnnnnnnnnnnnnnnnnnnnnnnnnnnnnnnnnnnnnnnnnnnnnnnnnnnnnnnnnnnnnnnnnnnnnnnnnnnnnnnnnnnnnnnnnnnnnnnnnnnnnnnnnnnnnnnnnnnnnnnnnnnnnnnnnnnnnnnnnnnnnnnnnnnnnnnnnnnnnnnnnnnnnnnnnnnnnnnnnnnnnnnnnnnnnnnnnnnnnnnnnnnnnnnnnnnnnnnnnnnnnnnnnnnnnnnnnnnnnnnnnnnnnnnnnnnnnnnnnnnnnnnnnnnnnnnnnnnnnnnnnnnnnnnnnnnnnnnnnnnnnnnnnnnnnnnnnnnnnnnnnnnnnnnnnnnnnnnnnnnnnnnnnnnnnnnnnnnnnnnnnnnnnnnnnnnnnnnnnnnnnnnnnnnnnnnnnnnnnnnnnnnnnnnnnnnnnnnnnnnnnnnnnnnnnnnnnnnnnnnnnnnnnnnnnnnnnnnnnnnnnnnnnnnnnnnnnnnnnnnnnnnnnnnnnnnnnnnnnnnnnnnnnnnnnnnnnnnnnnnnnnnnnnnnnnnnnnnnnnnnnnnnnnnnnnnnnnnnnnnnnnnnnnnnnnnnnnnnnnnnnnnnnnnnnnnnnnnnnnnnnnnnnnnnnnnnnnnnnnnnnnnnnnnnnnnnnnnnnnnnnnnnnnnnnnnnnnnnnnnnnnnnnnnnnnnnnnnnnnnnnnnnnnnnnnnnnnnnnnnnnnnnnnnnnnnnnnnnnnnnnnnnnnnnnnnnnnnnnnnnnnnnnnnnnnnnnnnnnnnnnnnnnnnnnnnnnnnnnnnnnnnnnnnnnnnnnnnnnnnnnnnnnnnnnnnnnnnnnnnnnnnnnnnnnnnnnnnnnnnnnnnnnnnnnnnnnnnnnnnnnnnnnnnnnnnnnnnnnnnnnnnnnnnnnnnnnnnnnnnnnnnnnnnnnnnnnnnnnnnnnnnnnnnnnnnnnnnnnnnnnnnnnnnnnnnnnnnnnnnnnnnnnnnnnnnnnnnnnnnnnnnnnnnnnnnnnnnnnnnnnnnnnnnnnnnnnnnnnnnnnnnnnnnnnnnnnnnnnnnnnnnnnnnnnnnnnnnnnnnnnnnnnnnnnnnnnnnnnnnnnnnnnnnnnnnnnnnnnnnnnnnnnnnnnnnnnnnnnnnnnnnnnnnnnnnnnnnnnnnnnnnnnnnnnnnnnnnnnnnnnnnnnnnnnnnnnnnnnnnnnnnnnnnnnnnnnnnnnnnnnnnnnnnnnnnnnnnnnnnnnnnnnnnnnnnnnnnnnnnnnnnnnnnnnnnnnnnnnnnnnnnnnnnnnnnnnnnnnnnnnnnnnnnnnnnnnnnnnnnnnnnnnnnnnnnnnnnnnnnnnnnnnnnnnnnnnnnnnnnnnnnnnnnnnnnnnnnnnnnnnnnnnnnnnnnnnnnnnnnnnnnnnnnnnnnnnnnnnnnnnnnnnnnnnnnnnnnnnnnnnnnnnnnnnnnnnnnnnnnnnnnnnnnnnnnnnnnnnnnnnnnnnnnnnnnnnnnnnnnnnnnnnnnnnnnnnnnnnnnnnnnnnnnnnnnnnnnnnnnnnnnnnnnnnnnnnnnnnnnnnnnnnnnnnnnnnnnnnnnnnnnnnnnnnnnnnnnnnnnnnnnnnnnnnnnnnnnnnnnnnnnnnnnnnnnnnnnnnnnnnnnnnnnnnnnnnnnnnnnnnnnnnnnnnnnnnnnnnnnnnnnnnnnnnnnnnnnnnnnnnnnnnnnnnnnnnnnnnnnnnnnnnnnnnnnnnnnnnnnnnnnnnnnnnnnnnnnnnnnnnnnnnnnnnnnnnnnnnnnnnnnnnnnnnnnnnnnnnnnnnnnnnnnnnnnnnnnnnnnnnnnnnnnnnnnnnnnnnnnnnnnnnnnnnnnnnnnnnnnnnnnnnnnnnnnnnnnnnnnnnnnnnnnnnnnnnnnnnnnnnnnnnnnnnnnnnnnnnnnnnnnnnnnnnnnnnnnnnnnnnnnnnnnnnnnnnnnnnnnnnnnnnnnnnnnnnnnnnnnnnnnnnnnnnnnnnnnnnnnnnnnnnnnnnnnnnnnnnnnnnnnnnnnnnnnnnnnnnnnnnnnnnnnnnnnnnnnnnnnnnnnnnnnnnnnnnnnnnnnnnnnnnnnnnnnnnnnnnnnnnnnnnnnnnnnnnnnnnnnnnnnnnnnnnnnnnnnnnnnnnnnnnnnnnnnnnnnnnnnnnnnnnnnnnnnnnnnnnnnnnnnnnnnnnnnnnnnnnnnnnnnnnnnnnnnnnnnnnnnnnnnnnnnnnnnnnnnnnnnnnnnnnnnnnnnnnnnnnnnnnnnnnnnnnnnnnnnnnnnnnnnnnnnnnnnnnnnnnnnnnnnnnnnnnnnnnnnnnnnnnnnnnnnnnnnnnnnnnnnnnnnnnnnnnnnnnnnnnnnnnnnnnnnnnnnnnnnnnnnnnnnnnnnnnnnnnnnnnnnnnnnnnnnnnnnnnnnnnnnnnnnnnnnnnnnnnnnnnnnnnnnnnnnnnnnnnnnnnnnnnnnnnnnnnnnnnnnnnnnnnnnnnnnnnnnnnnnnnnnnnnnnnnnnnnnnnnnnnnnnnnnnnnnnnnnnnnnnnnnnnnnnnnnnnnnnnnnnnnnnnnnnnnnnnnnnnnnnnnnnnnnnnnnnnnnnnnnnnnnnnnnnnnnnnnnnnnnnnnnnnnnnnnnnnnnnnnnnnnnnnnnnnnnnnnnnnnnnnnnnnnnnnnnnnnnnnnnnnnnnnnnnnnnnnnnnnnnnnnnnnnnnnnnnnnnnnnnnnnnnnnnnnnnnnnnnnnnnnnnnnnnnnnnnnnnnnnnnnnnnnnnnnnnnnnnnnnnnnnnnnnnnnnnnnnnnnnnnnnnnnnnnnnnnnnnnnnnnnnnnnnnnnnnnnnnnnnnnnnnnnnnnnnnnnnnnnnnnnnnnnnnnnnnnnnnnnnnnnnnnnnnnnnnnnnnnnnnnnnnnnnnnnnnnnnnnnnnnnnnnnnnnnnnnnnnnnnnnnnnnnnnnnnnnnnnnnnnnnnnnnnnnnnnnnnnnnnnnnnnnnnnnnnnnnnnnnnnnnnnnnnnnnnnnnnnnnnnnnnnnnnnnnnnnnnnnnnnnnnnnnnnnnnnnnnnnnnnnnnnnnnnnnnnnnnnnnnnnnnnnnnnnnnnnnnnnnnnnnnnnnnnnnnnnnnnnnnnnnnnnnnnnnnnnnnnnnnnnnnnnnnnnnnnnnnnnnnnnnnnnnnnnnnnnnnnnnnnnnnnnnnnnnnnnnnnnnnnnnnnnnnnnnnnnnnnnnnnnnnnnnnnnnnnnnnnnnnnnnnnnnnnnnnnnnnnnnnnnnnnnnnnnnnnnnnnnnnnnnnnnnnnnnnnnnnnnnnnnnnnnnnnnnnnnnnnnnnnnnnnnnnnnnnnnnnnnnnnnnnnnnnnnnnnnnnnnnnnnnnnnnnnnnnnnnnnnnnnnnnnnnnnnnnnnnnnnnnnnnnnnnnnnnnnnnnnnnnnnnnnnnnnnnnnnnnnnnnnnnnnnnnnnnnnnnnnnnnnnnnnnnnnnnnnnnnnnnnnnnnnnnnnnnnnnnnnnnnnnnnnnnnnnnnnnnnnnnnnnnnnnnnnnnnnnnnnnnnnnnnnnnnnnnnnnnnnnnnnnnnnnnnnnnnnnnnnnnnnnnnnnnnnnnnnnnnnnnnnnnnnnnnnnnnnnnnnnnnnnnnnnnnnnnnnnnnnnnnnnnnnnnnnnnnnnnnnnnnnnnnnnnnnnnnnnnnnnnnnnnnnnnnnnnnnnnnnnnnnnnnnnnnnnnnnnnnnnnnnnnnnnnnnnnnnnnnnnnnnnnnnnnnnnnnnnnnnnnnnnnnnnnnnnnnnnnnnnnnnnnnnnnnnnnnnnnnnnnnnnnnnnnnnnnnnnnnnnnnnnnnnnnnnnnnnnnnnnnnnnnnnnnnnnnnnnnnnnnnnnnnnnnnnnnnnnnnnnnnnnnnnnnnnnnnnnnnnnnnnnnnnnnnnnnnnnnnnnnnnnnnnnnnnnnnnnnnnnnnnnnnnnnnnnnnnnnnnnnnnnnnnnnnnnnnnnnnnnnnnnnnnnnnnnnnnnnnnnnnnnnnnnnnnnnnnnnnnnnnnnnnnnnnnnnnnnnnnnnnnnnnnnnnnnnnnnnnnnnnnnnnnnnnnnnnnnnnnnnnnnnnnnnnnnnnnnnnnnnnnnnnnnnnnnnnnnnnnnnnnnnnnnnnnnnnnnnnnnnnnnnnnnnnnnnnnnnnnnnnnnnnnnnnnnnnnnnnnnnnnnnnnnnnnnnnnnnnnnnnnnnnnnnnnnnnnnnnnnnnnnnnnnnnnnnnnnnnnnnnnnnnnnnnnnnnnnnnnnnnnnnnnnnnnnnnnnnnnnnnnnnnnnnnnnnnnnnnnnnnnnnnnnnnnnnnnnnnnnnnnnnnnnnnnnnnnnnnnnnnnnnnnnnnnnnnnnnnnnnnnnnnnnnnnnnnnnnnnnnnnnnnnnnnnnnnnnnnnnnnnnnnnnnnnnnnnnnnnnnnnnnnnnnnnnnnnnnnnnnnnnnnnnnnnnnnnnnnnnnnnnnnnnnnnnnnnnnnnnnnnnnnnnnnnnnnnnnnnnnnnnnnnnnnnnnnnnnnnnnnnnnnnnnnnnnnnnnnnnnnnnnnnnnnnnnnnnnnnnnnnnnnnnnnnnnnnnnnnnnnnnnnnnnnnnnnnnnnnnnnnnnnnnnnnnnnnnnnnnnnnnnnnnnnnnnnnnnnnnnnnnnnnnnnnnnnnnnnnnnnnnnnnnnnnnnnnnnnnnnnnnnnnnnnnnnnnnnnnnnnnnnnnnnnnnnnnnnnnnnnnnnnnnnnnnnnnnnnnnnnnnnnnnnnnnnnnnnnnnnnnnnnnnnnnnnnnnnnnnnnnnnnnnnnnnnnnnnnnnnnnnnnnnnnnnnnnnnnnnnnnnnnnnnnnnnnnnnnnnnnnnnnnnnnnnnnnnnnnnnnnnnnnnnnnnnnnnnnnnnnnnnnnnnnnnnnnnnnnnnnnnnnnnnnnnnnnnnnnnnnnnnnnnnnnnnnnnnnnnnnnnnnnnnnnnnnnnnnnnnnnnnnnnnnnnnnnnnnnnnnnnnnnnnnnnnnnnnnnnnnnnnnnnnnnnnnnnnnnnnnnnnnnnnnnnnnnnnnnnnnnnnnnnnnnnnnnnnnnnnnnnnnnnnnnnnnnnnnnnnnnnnnnnnnnnnnnnnnnnnnnnnnnnnnnnnnnnnnnnnnnnnnnnnnnnnnnnnnnnnnnnnnnnnnnnnnnnnnnnnnnnnnnnnnnnnnnnnnnnnnnnnnnnnnnnnnnnnnnnnnnnnnnnnnnnnnnnnnnnnnnnnnnnnnnnnnnnnnnnnnnnnnnnnnnnnnnnnnnnnnnnnnnnnnnnnnnnnnnnnnnnnnnnnnnnnnnnnnnnnnnnnnnnnnnnnnnnnnnnnnnnnnnnnnnnnnnnnnnnnnnnnnnnnnnnnnnnnnnnnnnnnnnnnnnnnnnnnnnnnnnnnnnnnnnnnnnnnnnnnnnnnnnnnnnnnnnnnnnnnnnnnnnnnnnnnnnnnnnnnnnnnnnnnnnnnnnnnnnnnnnnnnnnnnnnnnnnnnnnnnnnnnnnnnnnnnnnnnnnnnnnnnnnnnnnnnnnnnnnnnnnnnnnnnnnnnnnnnnnnnnnnnnnnnnnnnnnnnnnnnnnnnnnnnnnnnnnnnnnnnnnnnnnnnnnnnnnnnnnnnnnnnnnnnnnnnnnnnnnnnnnnnnnnnnnnnnnnnnnnnnnnnnnnnnnnnnnnnnnnnnnnnnnnnnnnnnnnnnnnnnnnnnnnnnnnnnnnnnnnnnnnnnnnnnnnnnnnnnnnnnnnnnnnnnnnnnnnnnnnnnnnnnnnnnnnnnnnnnnnnnnnnnnnnnnnnnnnnnnnnnnnnnnnnnnnnnnnnnnnnnnnnnnnnnnnnnnnnnnnnnnnnnnnnnnnnnnnnnnnnnnnnnnnnnnnnnnnnnnnnnnnnnnnnnnnnnnnnnnnnnnnnnnnnnnnnnnnnnnnnnnnnnnnnnnnnnnnnnnnnnnnnnnnnnnnnnnnnnnnnnnnnnnnnnnnnnnnnnnnnnnnnnnnnnnnnnnnnnnnnnnnnnnnnnnnnnnnnnnnnnnnnnnnnnnnnnnnnnnnnnnnnnnnnnnnnnnnnnnnnnnnnnnnnnnnnnnnnnnnnnnnnnnnnnnnnnnnnnnnnnnnnnnnnnnnnnnnnnnnnnnnnnnnnnnnnnnnnnnnnnnnnnnnnnnnnnnnnnnnnnnnnnnnnnnnnnnnnnnnnnnnnnnnnnnnnnnnnnnnnnnnnnnnnnnnnnnnnnnnnnnnnnnnnnnnnnnnnnnnnnnnnnnnnnnnnnnnnnnnnnnnnnnnnnnnnnnnnnnnnnnnnnnnnnnnnnnnnnnnnnnnnnnnnnnnnnnnnnnnnnnnnnnnnnnnnnnnnnnnnnnnnnnnnnnnnnnnnnnnnnnnnnnnnnnnnnnnnnnnnnnnnnnnnnnnnnnnnnnnnnnnnnnnnnnnnnnnnnnnnnnnnnnnnnnnnnnnnnnnnnnnnnnnnnnnnnnnnnnnnnnnnnnnnnnnnnnnnnnnnnnnnnnnnnnnnnnnnnnnnnnnnnnnnnnnnnnnnnnnnnnnnnnnnnnnnnnnnnnnnnnnnnnnnnnnnnnnnnnnnnnnnnnnnnnnnnnnnnnnnnnnnnnnnnnnnnnnnnnnnnnnnnnnnnnnnnnnnnnnnnnnnnnnnnnnnnnnnnnnnnnnnnnnnnnnnnnnnnnnnnnnnnnnnnnnnnnnnnnnnnnnnnnnnnnnnnnnnnnnnnnnnnnnnnnnnnnnnnnnnnnnnnnnnnnnnnnnnnnnnnnnnnnnnnnnnnnnnnnnnnnnnnnnnnnnnnnnnnnnnnnnnnnnnnnnnnnnnnnnnnnnnnnnnnnnnnnnnnnnnnnnnnnnnnnnnnnnnnnnnnnnnnnnnnnnnnnnnnnnnnnnnnnnnnnnnnnnnnnnnnnnnnnnnnnnnnnnnnnnnnnnnnnnnnnnnnnnnnnnnnnnnnnnnnnnnnnnnnnnnnnnnnnnnnnnnnnnnnnnnnnnnnnnnnnnnnnnnnnnnnnnnnnnnnnnnnnnnnnnnnnnnnnnnnnnnnnnnnnnnnnnnnnnnnnnnnnnnnnnnnnnnnnnnnnnnnnnnnnnnnnnnnnnnnnnnnnnnnnnnnnnnnnnnnnnnnnnnnnnnnnnnnnnnnnnnnnnnnnnnnnnnnnnnnnnnnnnnnnnnnnnnnnnnnnnnnnnnnnnnnnnnnnnnnnnnnnnnnnnnnnnnnnnnnnnnnnnnnnnnnnnnnnnnnnnnnnnnnnnnnnnnnnnnnnnnnnnnnnnnnnnnnnnnnnnnnnnnnnnnnnnnnnnnnnnnnnnnnnnnnnnnnnnnnnnnnnnnnnnnnnnnnnnnnnnnnnnnnnnnnnnnnnnnnnnnnnnnnnnnnnnnnnnnnnnnnnnnnnnnnnnnnnnnnnnnnnnnnnnnnnnnnnnnnnnnnnnnnnnnnnnnnnnnnnnnnnnnnnnnnnnnnnnnnnnnnnnnnnnnnnnnnnnnnnnnnnnnnnnnnnnnnnnnnnnnnnnnnnnnnnnnnnnnnnnnnnnnnnnnnnnnnnnnnnnnnnnnnnnnnnnnnnnnnnnnnnnnnnnnnnnnnnnnnnnnnnnnnnnnnnnnnnnnnnnnnnnnnnnnnnnnnnnnnnnnnnnnnnnnnnnnnnnnnnnnnnnnnnnnnnnnnnnnnnnnnnnnnnnnnnnnnnnnnnnnnnnnnnnnnnnnnnnnnnnnnnnnnnnnnnnnnnnnnnnnnnnnnnnnnnnnnnnnnnnnnnnnnnnnnnnnnnnnnnnnnnnnnnnnnnnnnnnnnnnnnnnnnnnnnnnnnnnnnnnnnnnnnnnnnnnnnnnnnnnnnnnnnnnnnnnnnnnnnnnnnnnnnnnnnnnnnnnnnnnnnnnnnnnnnnnnnnnnnnnnnnnnnnnnnnnnnnnnnnnnnnnnnnnnnnnnnnnnnnnnnnnnnnnnnnnnnnnnnnnnnnnnnnnnnnnnnnnnnnnnnnnnnnnnnnnnnnnnnnnnnnnnnnnnnnnnnnnnnnnnnnnnnnnnnnnnnnnnnnnnnnnnnnnnnnnnnnnnnnnnnnnnnnnnnnnnnnnnnnnnnnnnnnnnnnnnnnnnnnnnnnnnnnnnnnnnnnnnnnnnnnnnnnnnnnnnnnnnnnnnnnnnnnnnnnnnnnnnnnnnnnnnnnnnnnnnnnnnnnnnnnnnnnnnnnnnnnnnnnnnnnnnnnnnnnnnnnnnnnnnnnnnnnnnnnnnnnnnnnnnnnnnnnnnnnnnnnnnnnnnnnnnnnnnnnnnnnnnnnnnnnnnnnnnnnnnnnnnnnnnnnnnnnnnnnnnnnnnnnnnnnnnnnnnnnnnnnnnnnnnnnnnnnnnnnnnnnnnnnnnnnnnnnnnnnnnnnnnnnnnnnnnnnnnnnnnnnnnnnnnnnnnnnnnnnnnnnnnnnnnnnnnnnnnnnnnnnnnnnnnnnnnnnnnnnnnnnnnnnnnnnnnnnnnnnnnnnnnnnnnnnnnnnnnnnnnnnnnnnnnnnnnnnnnnnnnnnnnnnnnnnnnnnnnnnnnnnnnnnnnnnnnnnnnnnnnnnnnnnnnnnnnnnnnnnnnnnnnnnnnnnnnnnnnnnnnnnnnnnnnnnnnnnnnnnnnnnnnnnnnnnnnnnnnnnnnnnnnnnnnnnnnnnnnnnnnnnnnnnnnnnnnnnnnnnnnnnnnnnnnnnnnnnnnnnnnnnnnnnnnnnnnnnnnnnnnnnnnnnnnnnnnnnnnnnnnnnnnnnnnnnnnnnnnnnnnnnnnnnnnnnnnnnnnnnnnnnnnnnnnnnnnnnnnnnnnnnnnnnnnnnnnnnnnnnnnnnnnnnnnnnnnnnnnnnnnnnnnnnnnnnnnnnnnnnnnnnnnnnnnnnnnnnnnnnnnnnnnnnnnnnnnnnnnnnnnnnnnnnnnnnnnnnnnnnnnnnnnnnnnnnnnnnnnnnnnnnnnnnnnnnnnnnnnnnnnnnnnnnnnnnnnnnnnnnnnnnnnnnnnnnnnnnnnnnnnnnnnnnnnnnnnnnnnnnnnnnnnnnnnnnnnnnnnnnnnnnnnnnnnnnnnnnnnnnnnnnnnnnnnnnnnnnnnnnnnnnnnnnnnnnnnnnnnnnnnnnnnnnnnnnnnnnnnnnnnnnnnnnnnnnnnnnnnnnnnnnnnnnnnnnnnnnnnnnnnnnnnnnnnnnnnnnnnnnnnnnnnnnnnnnnnnnnnnnnnnnnnnnnnnnnnnnnnnnnnnnnnnnnnnnnnnnnnnnnnnnnnnnnnnnnnnnnnnnnnnnnnnnnnnnnnnnnnnnnnnnnnnnnnnnnnnnnnnnnnnnnnnnnnnnnnnnnnnnnnnnnnnnnnnnnnnnnnnnnnnnnnnnnnnnnnnnnnnnnnnnnnnnnnnnnnnnnnnnnnnnnnnnnnnnnnnnnnnnnnnnnnnnnnnnnnnnnnnnnnnnnnnnnnnnnnnnnnnnnnnnnnnnnnnnnnnnnnnnnnnnnnnnnnnnnnnnnnnnnnnnnnnnnnnnnnnnnnnnnnnnnnnnnnnnnnnnnnnnnnnnnnnnnnnnnnnnnnnnnnnnnnnnnnnnnnnnnnnnnnnnnnnnnnnnnnnnnnnnnnnnnnnnnnnnnnnnnnnnnnnnnnnnnnnnnnnnnnnnnnnnnnnnnnnnnnnnnnnnnnnnnnnnnnnnnnnnnnnnnnnnnnnnnnnnnnnnnnnnnnnnnnnnnnnnnnnnnnnnnnnnnnnnnnnnnnnnnnnnnnnnnnnnnnnnnnnnnnnnnnnnnnnnnnnnnnnnnnnnnnnnnnnnnnnnnnnnnnnnnnnnnnnnnnnnnnnnnnnnnnnnnnnnnnnnnnnnnnnnnnnnnnnnnnnnnnnnnnnnnnnnnnnnnnnnnnnnnnnnnnnnnnnnnnnnnnnnnnnnnnnnnnnnnnnnnnnnnnnnnnnnnnnnnnnnnnnnnnnnnnnnnnnnnnnnnnnnnnnnnnnnnnnnnnnnnnnnnnnnnnnnnnnnnnnnnnnnnnnnnnnnnnnnnnnnnnnnnnnnnnnnnnnnnnnnnnnnnnnnnnnnnnnnnnnnnnnnnnnnnnnnnnnnnnnnnnnnnnnnnnnnnnnnnnnnnnnnnnnnnnnnnnnnnnnnnnnnnnnnnnnnnnnnnnnnnnnnnnnnnnnnnnnnnnnnnnnnnnnnnnnnnnnnnnnnnnnnnnnnnnnnnnnnnnnnnnnnnnnnnnnnnnnnnnnnnnnnnnnnnnnnnnnnnnnnnnnnnnnnnnnnnnnnnnnnnnnnnnnnnnnnnnnnnnnnnnnnnnnnnnnnnnnnnnnnnnnnnnnnnnnnnnnnnnnnnnnnnnnnnnnnnnnnnnnnnnnnnnnnnnnnnnnnnnnnnnnnnnnnnnnnnnnnnnnnnnnnnnnnnnnnnnnnnnnnnnnnnnnnnnnnnnnnnnnnnnnnnnnnnnnnnnnnnnnnnnnnnnnnnnnnnnnnnnnnnnnnnnnnnnnnnnnnnnnnnnnnnnnnnnnnnnnnnnnnnnnnnnnnnnnnnnnnnnnnnnnnnnnnnnnnnnnnnnnnnnnnnnnnnnnnnnnnnnnnnnnnnnnnnnnnnnnnnnnnnnnnnnnnnnnnnnnnnnnnnnnnnnnnnnnnnnnnnnnnnnnnnnnnnnnnnnnnnnnnnnnnnnnnnnnnnnnnnnnnnnnnnnnnnnnnnnnnnnnnnnnnnnnnnnnnnnnnnnnnnnnnnnnnnnnnnnnnnnnnnnnnnnnnnnnnnnnnnnnnnnnnnnnnnnnnnnnnnnnnnnnnnnnnnnnnnnnnnnnnnnnnnnnnnnnnnnnnnnnnnnnnnnnnnnnnnnnnnnnnnnnnnnnnnnnnnnnnnnnnnnnnnnnnnnnnnnnnnnnnnnnnnnnnnnnnnnnnnnnnnnnnnnnnnnnnnnnnnnnnnnnnnnnnnnnnnnnnnnnnnnnnnnnnnnnnnnnnnnnnnnnnnnnnnnnnnnnnnnnnnnnnnnnnnnnnnnnnnnnnnnnnnnnnnnnnnnnnnnnnnnnnnnnnnnnnnnnnnnnnnnnnnnnnnnnnnnnnnnnnnnnnnnnnnnnnnnnnnnnnnnnnnnnnnnnnnnnnnnnnnnnnnnnnnnnnnnnnnnnnnnnnnnnnnnnnnnnnnnnnnnnnnnnnnnnnnnnnnnnnnnnnnnnnnnnnnnnnnnnnnnnnnnnnnnnnnnnnnnnnnnnnnnnnnnnnnnnnnnnnnnnnnnnnnnnnnnnnnnnnnnnnnnnnnnnnnnnnnnnnnnnnnnnnnnnnnnnnnnnnnnnnnnnnnnnnnnnnnnnnnnnnnnnnnnnnnnnnnnnnnnnnnnnnnnnnnnnnnnnnnnnnnnnnnnnnnnnnnnnnnnnnnnnnnnnnnnnnnnnnnnnnnnnnnnnnnnnnnnnnnnnnnnnnnnnnnnnnnnnnnnnnnnnnnnnnnnnnnnnnnnnnnnnnnnnnnnnnnnnnnnnnnnnnnnnnnnnnnnnnnnnnnnnnnnnnnnnnnnnnnnnnnnnnnnnnnnnnnnnnnnnnnnnnnnnnnnnnnnnnnnnnnnnnnnnnnnnnnnnnnnnnnnnnnnnnnnnnnnnnnnnnnnnnnnnnnnnnnnnnnnnnnnnnnnnnnnnnnnnnnnnnnnnnnnnnnnnnnnnnnnnnnnnnnnnnnnnnnnnnnnnnnnnnnnnnnnnnnnnnnnnnnnnnnnnnnnnnnnnnnnnnnnnnnnnnnnnnnnnnnnnnnnnnnnnnnnnnnnnnnnnnnnnnnnnnnnnnnnnnnnnnnnnnnnnnnnnnnnnnnnnnnnnnnnnnnnnnnnnnnnnnnnnnnnnnnnnnnnnnnnnnnnnnnnnnnnnnnnnnnnnnnnnnnnnnnnnnnnnnnnnnnnnnnnnnnnnnnnnnnnnnnnnnnnnnnnnnnnnnnnnnnnnnnnnnnnnnnnnnnnnnnnnnnnnnnnnnnnnnnnnnnnnnnnnnnnnnnnnnnnnnnnnnnnnnnnnnnnnnnnnnnnnnnnnnnnnnnnnnnnnnnnnnnnnnnnnnnnnnnnnnnnnnnnnnnnnnnnnnnnnnnnnnnnnnnnnnnnnnnnnnnnnnnnnnnnnnnnnnnnnnnnnnnnnnnnnnnnnnnnnnnnnnnnnnnnnnnnnnnnnnnnnnnnnnnnnnnnnnnnnnnnnnnnnnnnnnnnnnnnnnnnnnnnnnnnnnnnnnnnnnnnnnnnnnnnnnnnnnnnnnnnnnnnnnnnnnnnnnnnnnnnnnnnnnnnnnnnnnnnnnnnnnnnnnnnnnnnnnnnnnnnnnnnnnnnnnnnnnnnnnnnnnnnnnnnnnnnnnnnnnnnnnnnnnnnnnnnnnnnnnnnnnnnnnnnnnnnnnnnnnnnnnnnnnnnnnnnnnnnnnnnnnnnnnnnnnnnnnnnnnnnnnnnnnnnnnnnnnnnnnnnnnnnnnnnnnnnnnnnnnnnnnnnnnnnnnnnnnnnnnnnnnnnnnnnnnnnnnnnnnnnnnnnnnnnnnnnnnnnnnnnnnnnnnnnnnnnnnnnnnnnnnnnnnnnnnnnnnnnnnnnnnnnnnnnnnnnnnnnnnnnnnnnnnnnnnnnnnnnnnnnnnnnnnnnnnnnnnnnnnnnnnnnnnnnnnnnnnnnnnnnnnnnnnnnnnnnnnnnnnnnnnnnnnnnnnnnnnnnnnnnnnnnnnnnnnnnnnnnnnnnnnnnnnnnnnnnnnnnnnnnnnnnnnnnnnnnnnnnnnnnnnnnnnnnnnnnnnnnnnnnnnnnnnnnnnnnnnnnnnnnnnnnnnnnnnnnnnnnnnnnnnnnnnnnnnnnnnnnnnnnnnnnnnnnnnnnnnnnnnnnnnnnnnnnnnnnnnnnnnnnnnnnnnnnnnnnnnnnnnnnnnnnnnnnnnnnnnnnnnnnnnnnnnnnnnnnnnnnnnnnnnnnnnnnnnnnnnnnnnnnnnnnnnnnnnnnnnnnnnnnnnnnnnnnnnnnnnnnnnnnnnnnnnnnnnnnnnnnnnnnnnnnnnnnnnnnnnnnnnnnnnnnnnnnnnnnnnnnnnnnnnnnnnnnnnnnnnnnnnnnnnnnnnnnnnnnnnnnnnnnnnnnnnnnnnnnnnnnnnnnnnnnnnnnnnnnnnnnnnnnnnnnnnnnnnnnnnnnnnnnnnnnnnnnnnnnnnnnnnnnnnnnnnnnnnnnnnnnnnnnnnnnnnnnnnnnnnnnnnnnnnnnnnnnnnnnnnnnnnnnnnnnnnnnnnnnnnnnnnnnnnnnnnnnnnnnnnnnnnnnnnnnnnnnnnnnnnnnnnnnnnnnnnnnnnnnnnnnnnnnnnnnnnnnnnnnnnnnnnnnnnnnnnnnnnnnnnnnnnnnnnnnnnnnnnnnnnnnnnnnnnnnnnnnnnnnnnnnnnnnnnnnnnnnnnnnnnnnnnnnnnnnnnnnnnnnnnnnnnnnnnnnnnnnnnnnnnnnnnnnnnnnnnnnnnnnnnnnnnnnnnnnnnnnnnnnnnnnnnnnnnnnnnnnnnnnnnnnnnnnnnnnnnnnnnnnnnnnnnnnnnnnnnnnnnnnnnnnnnnnnnnnnnnnnnnnnnnnnnnnnnnnnnnnnnnnnnnnnnnnnnnnnnnnnnnnnnnnnnnnnnnnnnnnnnnnnnnnnnnnnnnnnnnnnnnnnnnnnnnnnnnnnnnnnnnnnnnnnnnnnnnnnnnnnnnnnnnnnnnnnnnnnnnnnnnnnnnnnnnnnnnnnnnnnnnnnnnnnnnnnnnnnnnnnnnnnnnnnnnnnnnnnnnnnnnnnnnnnnnnnnnnnnnnnnnnnnnnnnnnnnnnnnnnnnnnnnnnnnnnnnnnnnnnnnnnnnnnnnnnnnnnnnnnnnnnnnnnnnnnnnnnnnnnnnnnnnnnnnnnnnnnnnnnnnnnnnnnnnnnnnnnnnnnnnnnnnnnnnnnnnnnnnnnnnnnnnnnnnnnnnnnnnnnnnnnnnnnnnnnnnnnnnnnnnnnnnnnnnnnnnnnnnnnnnnnnnnnnnnnnnnnnnnnnnnnnnnnnnnnnnnnnnnnnnnnnnnnnnnnnnnnnnnnnnnnnnnnnnnnnnnnnnnnnnnnnnnnnnnnnnnnnnnnnnnnnnnnnnnnnnnnnnnnnnnnnnnnnnnnnnnnnnnnnnnnnnnnnnnnnnnnnnnnnnnnnnnnnnnnnnnnnnnnnnnnnnnnnnnnnnnnnnnnnnnnnnnnnnnnnnnnnnnnnnnnnnnnnnnnnnnnnnnnnnnnnnnnnnnnnnnnnnnnnnnnnnnnnnnnnnnnnnnnnnnnnnnnnnnnnnnnnnnnnnnnnnnnnnnnnnnnnnnnnnnnnnnnnnnnnnnnnnnnnnnnnnnnnnnnnnnnnnnnnnnnnnnnnnnnnnnnnnnnnnnnnnnnnnnnnnnnnnnnnnnnnnnnnnnnnnnnnnnnnnnnnnnnnnnnnnnnnnnnnnnnnnnnnnnnnnnnnnnnnnnnnnnnnnnnnnnnnnnnnnnnnnnnnnnnnnnnnnnnnnnnnnnnnnnnnnnnnnnnnnnnnnnnnnnnnnnnnnnnnnnnnnnnnnnnnnnnnnnnnnnnnnnnnnnnnnnnnnnnnnnnnnnnnnnnnnnnnnnnnnnnnnnnnnnnnnnnnnnnnnnnnnnnnnnnnnnnnnnnnnnnnnnnnnnnnnnnnnnnnnnnnnnnnnnnnnnnnnnnnnnnnnnnnnnnnnnnnnnnnnnnnnnnnnnnnnnnnnnnnnnnnnnnnnnnnnnnnnnnnnnnnnnnnnnnnnnnnnnnnnnnnnnnnnnnnnnnnnnnnnnnnnnnnnnnnnnnnnnnnnnnnnnnnnnnnnnnnnnnnnnnnnnnnnnnnnnnnnnnnnnnnnnnnnnnnnnnnnnnnnnnnnnnnnnnnnnnnnnnnnnnnnnnnnnnnnnnnnnnnnnnnnnnnnnnnnnnnnnnnnnnnnnnnnnnnnnnnnnnnnnnnnnnnnnnnnnnnnnnnnnnnnnnnnnnnnnnnnnnnnnnnnnnnnnnnnnnnnnnnnnnnnnnnnnnnnnnnnnnnnnnnnnnnnnnnnnnnnnnnnnnnnnnnnnnnnnnnnnnnnnnnnnnnnnnnnnnnnnnnnnnnnnnnnnnnnnnnnnnnnnnnnnnnnnnnnnnnnnnnnnnnnnnnnnnnnnnnnnnnnnnnnnnnnnnnnnnnnnnnnnnnnnnnnnnnnnnnnnnnnnnnnnnnnnnnnnnnnnnnnnnnnnnnnnnnnnnnnnnnnnnnnnnnnnnnnnnnnnnnnnnnnnnnnnnnnnnnnnnnnnnnnnnnnnnnnnnnnnnnnnnnnnnnnnnnnnnnnnnnnnnnnnnnnnnnnnnnnnnnnnnnnnnnnnnnnnnnnnnnnnnnnnnnnnnnnnnnnnnnnnnnnnnnnnnnnnnnnnnnnnnnnnnnnnnnnnnnnnnnnnnnnnnnnnnnnnnnnnnnnnnnnnnnnnnnnnnnnnnnnnnnnnnnnnnnnnnnnnnnnnnnnnnnnnnnnnnnnnnnnnnnnnnnnnnnnnnnnnnnnnnnnnnnnnnnnnnnnnnnnnnnnnnnnnnnnnnnnnnnnnnnnnnnnnnnnnnnnnnnnnnnnnnnnnnnnnnnnnnnnnnnnnnnnnnnnnnnnnnnnnnnnnnnnnnnnnnnnnnnnnnnnnnnnnnnnnnnnnnnnnnnnnnnnnnnnnnnnnnnnnnnnnnnnnnnnnnnnnnnnnnnnnnnnnnnnnnnnnnnnnnnnnnnnnnnnnnnnnnnnnnnnnnnnnnnnnnnnnnnnnnnnnnnnnnnnnnnnnnnnnnnnnnnnnnnnnnnnnnnnnnnnnnnnnnnnnnnnnnnnnnnnnnnnnnnnnnnnnnnnnnnnnnnnnnnnnnnnnnnnnnnnnnnnnnnnnnnnnnnnnnnnnnnnnnnnnnnnnnnnnnnnnnnnnnnnnnnnnnnnnnnnnnnnnnnnnnnnnnnnnnnnnnnnnnnnnnnnnnnnnnnnnnnnnnnnnnnnnnnnnnnnnnnnnnnnnnnnnnnnnnnnnnnnnnnnnnnnnnnnnnnnnnnnnnnnnnnnnnnnnnnnnnnnnnnnnnnnnnnnnnnnnnnnnnnnnnnnnnnnnnnnnnnnnnnnnnnnnnnnnnnnnnnnnnnnnnnnnnnnnnnnnnnnnnnnnnnnnnnnnnnnnnnnnnnnnnnnnnnnnnnnnnnnnnnnnnnnnnnnnnnnnnnnnnnnnnnnnnnnnnnnnnnnnnnnnnnnnnnnnnnnnnnnnnnnnnnnnnnnnnnnnnnnnnnnnnnnnnnnnnnnnnnnnnnnnnnnnnnnnnnnnnnnnnnnnnnnnnnnnnnnnnnnnnnnnnnnnnnnnnnnnnnnnnnnnnnnnnnnnnnnnnnnnnnnnnnnnnnnnnnnnnnnnnnnnnnnnnnnnnnnnnnnnnnnnnnnnnnnnnnnnnnnnnnnnnnnnnnnnnnnnnnnnnnnnnnnnnnnnnnnnnnnnnnnnnnnnnnnnnnnnnnnnnnnnnnnnnnnnnnnnnnnnnnnnnnnnnnnnnnnnnnnnnnnnnnnnnnnnnnnnnnnnnnnnnnnnnnnnnnnnnnnnnnnnnnnnnnnnnnnnnnnnnnnnnnnnnnnnnnnnnnnnnnnnnnnnnnnnnnnnnnnnnnnnnnnnnnnnnnnnnnnnnnnnnnnnnnnnnnnnnnnnnnnnnnnnnnnnnnnnnnnnnnnnnnnnnnnnnnnnnnnnnnnnnnnnnnnnnnnnnnnnnnnnnnnnnnnnnnnnnnnnnnnnnnnnnnnnnnnnnnnnnnnnnnnnnnnnnnnnnnnnnnnnnnnnnnnnnnnnnnnnnnnnnnnnnnnnnnnnnnnnnnnnnnnnnnnnnnnnnnnnnnnnnnnnnnnnnnnnnnnnnnnnnnnnnnnnnnnnnnnnnnnnnnnnnnnnnnnnnnnnnnnnnnnnnnnnnnnnnnnnnnnnnnnnnnnnnnnnnnnnnnnnnnnnnnnnnnnnnnnnnnnnnnnnnnnnnnnnnnnnnnnnnnnnnnnnnnnnnnnnnnnnnnnnnnnnnnnnnnnnnnnnnnnnnnnnnnnnnnnnnnnnnnnnnnnnnnnnnnnnnnnnnnnnnnnnnnnnnnnnnnnnnnnnnnnnnnnnnnnnnnnnnnnnnnnnnnnnnnnnnnnnnnnnnnnnnnnnnnnnnnnnnnnnnnnnnnnnnnnnnnnnnnnnnnnnnnnnnnnnnnnnnnnnnnnnnnnnnnnnnnnnnnnnnnnnnnnnnnnnnnnnnnnnnnnnnnnnnnnnnnnnnnnnnnnnnnnnnnnnnnnnnnnnnnnnnnnnnnnnnnnnnnnnnnnnnnnnnnnnnnnnnnnnnnnnnnnnnnnnnnnnnnnnnnnnnnnnnnnnnnnnnnnnnnnnnnnnnnnnnnnnnnnnnnnnnnnnnnnnnnnnnnnnnnnnnnnnnnnnnnnnnnnnnnnnnnnnnnnnnnnnnnnnnnnnnnnnnnnnnnnnnnnnnnnnnnnnnnnnnnnnnnnnnnnnnnnnnnnnnnnnnnnnnnnnnnnnnnnnnnnnnnnnnnnnnnnnnnnnnnnnnnnnnnnnnnnnnnnnnnnnnnnnnnnnnnnnnnnnnnnnnnnnnnnnnnnnnnnnnnnnnnnnnnnnnnnnnnnnnnnnnnnnnnnnnnnnnnnnnnnnnnnnnnnnnnnnnnnnnnnnnnnnnnnnnnnnnnnnnnnnnnnnnnnnnnnnnnnnnnnnnnnnnnnnnnnnnnnnnnnnnnnnnnnnnnnnnnnnnnnnnnnnnnnnnnnnnnnnnnnnnnnnnnnnnnnnnnnnnnnnnnnnnnnnnnnnnnnnnnnnnnnnnnnnnnnnnnnnnnnnnnnnnnnnnnnnnnnnnnnnnnnnnnnnnnnnnnnnnnnnnnnnnnnnnnnnnnnnnnnnnnnnnnnnnnnnnnnnnnnnnnnnnnnnnnnnnnnnnnnnnnnnnnnnnnnnnnnnnnnnnnnnnnnnnnnnnnnnnnnnnnnnnnnnnnnnnnnnnnnnnnnnnnnnnnnnnnnnnnnnnnnnnnnnnnnnnnnnnnnnnnnnnnnnnnnnnnnnnnnnnnnnnnnnnnnnnnnnnnnnnnnnnnnnnnnnnnnnnnnnnnnnnnnnnnnnnnnnnnnnnnnnnnnnnnnnnnnnnnnnnnnnnnnnnnnnnnnnnnnnnnnnnnnnnnnnnnnnnnnnnnnnnnnnnnnnnnnnnnnnnnnnnnnnnnnnnnnnnnnnnnnnnnnnnnnnnnnnnnnnnnnnnnnnnnnnnnnnnnnnnnnnnnnnnnnnnnnnnnnnnnnnnnnnnnnnnnnnnnnnnnnnnnnnnnnnnnnnnnnnnnnnnnnnnnnnnnnnnnnnnnnnnnnnnnnnnnnnnnnnnnnnnnnnnnnnnnnnnnnnnnnnnnnnnnnnnnnnnnnnnnnnnnnnnnnnnnnnnnnnnnnnnnnnnnnnnnnnnnnnnnnnnnnnnnnnnnnnnnnnnnnnnnnnnnnnnnnnnnnnnnnnnnnnnnnnnnnnnnnnnnnnnnnnnnnnnnnnnnnnnnnnnnnnnnnnnnnnnnnnnnnnnnnnnnnnnnnnnnnnnnnnnnnnnnnnnnnnnnnnnnnnnnnnnnnnnnnnnnnnnnnnnnnnnnnnnnnnnnnnnnnnnnnnnnnnnnnnnnnnnnnnnnnnnnnnnnnnnnnnnnnnnnnnnnnnnnnnnnnnnnnnnnnnnnnnnnnnnnnnnnnnnnnnnnnnnnnnnnnnnnnnnnnnnnnnnnnnnnnnnnnnnnnnnnnnnnnnnnnnnnnnnnnnnnnnnnnnnnnnnnnnnnnnnnnnnnnnnnnnnnnnnnnnnnnnnnnnnnnnnnnnnnnnnnnnnnnnnnnnnnnnnnnnnnnnnnnnnnnnnnnnnnnnnnnnnnnnnnnnnnnnnnnnnnnnnnnnnnnnnnnnnnnnnnnnnnnnnnnnnnnnnnnnnnnnnnnnnnnnnnnnnnnnnnnnnnnnnnnnnnnnnnnnnnnnnnnnnnnnnnnnnnnnnnnnnnnnnnnnnnnnnnnnnnnnnnnnnnnnnnnnnnnnnnnnnnnnnnnnnnnnnnnnnnnnnnnnnnnnnnnnnnnnnnnnnnnnnnnnnnnnnnnnnnnnnnnnnnnnnnnnnnnnnnnnnnnnnnnnnnnnnnnnnnnnnnnnnnnnnnnnnnnnnnnnnnnnnnnnnnnnnnnnnnnnnnnnnnnnnnnnnnnnnnnnnnnnnnnnnnnnnnnnnnnnnnnnnnnnnnnnnnnnnnnnnnnnnnnnnnnnnnnnnnnnnnnnnnnnnnnnnnnnnnnnnnnnnnnnnnnnnnnnnnnnnnnnnnnnnnnnnnnnnnnnnnnnnnnnnnnnnnnnnnnnnnnnnnnnnnnnnnnnnnnnnnnnnnnnnnnnnnnnnnnnnnnnnnnnnnnnnnnnnnnnnnnnnnnnnnnnnnnnnnnnnnnnnnnnnnnnnnnnnnnnnnnnnnnnnnnnnnnnnnnnnnnnnnnnnnnnnnnnnnnnnnnnnnnnnnnnnnnnnnnnnnnnnnnnnnnnnnnnnnnnnnnnnnnnnnnnnnnnnnnnnnnnnnnnnnnnnnnnnnnnnnnnnnnnnnnnnnnnnnnnnnnnnnnnnnnnnnnnnnnnnnnnnnnnnnnnnnnnnnnnnnnnnnnnnnnnnnnnnnnnnnnnnnnnnnnnnnnnnnnnnnnnnnnnnnnnnnnnnnnnnnnnnnnnnnnnnnnnnnnnnnnnnnnnnnnnnnnnnnnnnnnnnnnnnnnnnnnnnnnnnnnnnnnnnnnnnnnnnnnnnnnnnnnnnnnnnnnnnnnnnnnnnnnnnnnnnnnnnnnnnnnnnnnnnnnnnnnnnnnnnnnnnnnnnnnnnnnnnnnnnnnnnnnnnnnnnnnnnnnnnnnnnnnnnnnnnnnnnnnnnnnnnnnnnnnnnnnnnnnnnnnnnnnnnnnnnnnnnnnnnnnnnnnnnnnnnnnnnnnnnnnnnnnnnnnnnnnnnnnnnnnnnnnnnnnnnnnnnnnnnnnnnnnnnnnnnnnnnnnnnnnnnnnnnnnnnnnnnnnnnnnnnnnnnnnnnnnnnnnnnnnnnnnnnnnnnnnnnnnnnnnnnnnnnnnnnnnnnnnnnnnnnnnnnnnnnnnnnnnnnnnnnnnnnnnnnnnnnnnnnnnnnnnnnnnnnnnnnnnnnnnnnnnnnnnnnnnnnnnnnnnnnnnnnnnnnnnnnnnnnnnnnnnnnnnnnnnnnnnnnnnnnnnnnnnnnnnnnnnnnnnnnnnnnnnnnnnnnnnnnnnnnnnnnnnnnnnnnnnnnnnnnnnnnnnnnnnnnnnnnnnnnnnnnnnnnnnnnnnnnnnnnnnnnnnnnnnnnnnnnnnnnnnnnnnnnnnnnnnnnnnnnnnnnnnnnnnnnnnnnnnnnnnnnnnnnnnnnnnnnnnnnnnnnnnnnnnnnnnnnnnnnnnnnnnnnnnnnnnnnnnnnnnnnnnnnnnnnnnnnnnnnnnnnnnnnnnnnnnnnnnnnnnnnnnnnnnnnnnnnnnnnnnnnnnnnnnnnnnnnnnnnnnnnnnnnnnnnnnnnnnnnnnnnnnnnnnnnnnnnnnnnnnnnnnnnnnnnnnnnnnnnnnnnnnnnnnnnnnnnnnnnnnnnnnnnnnnnnnnnnnnnnnnnnnnnnnnnnnnnnnnnnnnnnnnnnnnnnnnnnnnnnnnnnnnnnnnnnnnnnnnnnnnnnnnnnnnnnnnnnnnnnnnnnnnnnnnnnnnnnnnnnnnnnnnnnnnnnnnnnnnnnnnnnnnnnnnnnnnnnnnnnnnnnnnnnnnnnnnnnnnnnnnnnnnnnnnnnnnnnnnnnnnnnnnnnnnnnnnnnnnnnnnnnnnnnnnnnnnnnnnnnnnnnnnnnnnnnnnnnnnnnnnnnnnnnnnnnnnnnnnnnnnnnnnnnnnnnnnnnnnnnnnnnnnnnnnnnnnnnnnnnnnnnnnnnnnnnnnnnnnnnnnnnnnnnnnnnnnnnnnnnnnnnnnnnnnnnnnnnnnnnnnnnnnnnnnnnnnnnnnnnnnnnnnnnnnnnnnnnnnnnnnnnnnnnnnnnnnnnnnnnnnnnnnnnnnnnnnnnnnnnnnnnnnnnnnnnnnnnnnnnnnnnnnnnnnnnnnnnnnnnnnnnnnnnnnnnnnnnnnnnnnnnnnnnnnnnnnnnnnnnnnnnnnnnnnnnnnnnnnnnnnnnnnnnnnnnnnnnnnnnnnnnnnnnnnnnnnnnnnnnnnnnnnnnnnnnnnnnnnnnnnnnnnnnnnnnnnnnnnnnnnnnnnnnnnnnnnnnnnnnnnnnnnnnnnnnnnnnnnnnnnnnnnnnnnnnnnnnnnnnnnnnnnnnnnnnnnnnnnnnnnnnnnnnnnnnnnnnnnnnnnnnnnnnnnnnnnnnnnnnnnnnnnnnnnnnnnnnnnnnnnnnnnnnnnnnnnnnnnnnnnnnnnnnnnnnnnnnnnnnnnnnnnnnnnnnnnnnnnnnnnnnnnnnnnnnnnnnnnnnnnnnnnnnnnnnnnnnnnnnnnnnnnnnnnnnnnnnnnnnnnnnnnnnnnnnnnnnnnnnnnnnnnnnnnnnnnnnnnnnnnnnnnnnnnnnnnnnnnnnnnnnnnnnnnnnnnnnnnnnnnnnnnnnnnnnnnnnnnnnnnnnnnnnnnnnnnnnnnnnnnnnnnnnnnnnnnnnnnnnnnnnnnnnnnnnnnnnnnnnnnnnnnnnnnnnnnnnnnnnnnnnnnnnnnnnnnnnnnnnnnnnnnnnnnnnnnnnnnnnnnnnnnnnnnnnnnnnnnnnnnnnnnnnnnnnnnnnnnnnnnnnnnnnnnnnnnnnnnnnnnnnnnnnnnnnnnnnnnnnnnnnnnnnnnnnnnnnnnnnnnnnnnnnnnnnnnnnnnnnnnnnnnnnnnnnnnnnnnnnnnnnnnnnnnnnnnnnnnnnnnnnnnnnnnnnnnnnnnnnnnnnnnnnnnnnnnnnnnnnnnnnnnnnnnnnnnnnnnnnnnnnnnnnnnnnnnnnnnnnnnnnnnnnnnnnnnnnnnnnnnnnnnnnnnnnnnnnnnnnnnnnnnnnnnnnnnnnnnnnnnnnnnnnnnnnnnnnnnnnnnnnnnnnnnnnnnnnnnnnnnnnnnnnnnnnnnnnnnnnnnnnnnnnnnnnnnnnnnnnnnnnnnnnnnnnnnnnnnnnnnnnnnnnnnnnnnnnnnnnnnnnnnnnnnnnnnnnnnnnnnnnnnnnnnnnnnnnnnnnnnnnnnnnnnnnnnnnnnnnnnnnnnnnnnnnnnnnnnnnnnnnnnnnnnnnnnnnnnnnnnnnnnnnnnnnnnnnnnnnnnnnnnnnnnnnnnnnnnnnnnnnnnnnnnnnnnnnnnnnnnnnnnnnnnnnnnnnnnnnnnnnnnnnnnnnnnnnnnnnnnnnnnnnnnnnnnnnnnnnnnnnnnnnnnnnnnnnnnnnnnnnnnnnnnnnnnnnnnnnnnnnnnnnnnnnnnnnnnnnnnnnnnnnnnnnnnnnnnnnnnnnnnnnnnnnnnnnnnnnnnnnnnnnnnnnnnnnnnnnnnnnnnnnnnnnnnnnnnnnnnnnnnnnnnnnnnnnnnnnnnnnnnnnnnnnnnnnnnnnnnnnnnnnnnnnnnnnnnnnnnnnnnnnnnnnnnnnnnnnnnnnnnnnnnnnnnnnnnnnnnnnnnnnnnnnnnnnnnnnnnnnnnnnnnnnnnnnnnnnnnnnnnnnnnnnnnnnnnnnnnnnnnnnnnnnnnnnnnnnnnnnnnnnnnnnnnnnnnnnnnnnnnnnnnnnnnnnnnnnnnnnnnnnnnnnnnnnnnnnnnnnnnnnnnnnnnnnnnnnnnnnnnnnnnnnnnnnnnnnnnnnnnnnnnnnnnnnnnnnnnnnnnnnnnnnnnnnnnnnnnnnnnnnnnnnnnnnnnnnnnnnnnnnnnnnnnnnnnnnnnnnnnnnnnnnnnnnnnnnnnnnnnnnnnnnnnnnnnnnnnnnnnnnnnnnnnnnnnnnnnnnnnnnnnnnnnnnnnnnnnnnnnnnnnnnnnnnnnnnnnnnnnnnnnnnnnnnnnnnnnnnnnnnnnnnnnnnnnnnnnnnnnnnnnnnnnnnnnnnnnnnnnnnnnnnnnnnnnnnnnnnnnnnnnnnnnnnnnnnnnnnnnnnnnnnnnnnnnnnnnnnnnnnnnnnnnnnnnnnnnnnnnnnnnnnnnnnnnnnnnnnnnnnnnnnnnnnnnnnnnnnnnnnnnnnnnnnnnnnnnnnnnnnnnnnnnnnnnnnnnnnnnnnnnnnnnnnnnnnnnnnnnnnnnnnnnnnnnnnnnnnnnnnnnnnnnnnnnnnnnnnnnnnnnnnnnnnnnnnnnnnnnnnnnnnnnnnnnnnnnnnnnnnnnnnnnnnnnnnnnnnnnnnnnnnnnnnnnnnnnnnnnnnnnnnnnnnnnnnnnnnnnnnnnnnnnnnnnnnnnnnnnnnnnnnnnnnnnnnnnnnnnnnnnnnnnnnnnnnnnnnnnnnnnnnnnnnnnnnnnnnnnnnnnnnnnnnnnnnnnnnnnnnnnnnnnnnnnnnnnnnnnnnnnnnnnnnnnnnnnnnnnnnnnnnnnnnnnnnnnnnnnnnnnnnnnnnnnnnnnnnnnnnnnnnnnnnnnnnnnnnnnnnnnnnnnnnnnnnnnnnnnnnnnnnnnnnnnnnnnnnnnnnnnnnnnnnnnnnnnnnnnnnnnnnnnnnnnnnnnnnnnnnnnnnnnnnnnnnnnnnnnnnnnnnnnnnnnnnnnnnnnnnnnnnnnnnnnnnnnnnnnnnnnnnnnnnnnnnnnnnnnnnnnnnnnnnnnnnnnnnnnnnnnnnnnnnnnnnnnnnnnnnnnnnnnnnnnnnnnnnnnnnnnnnnnnnnnnnnnnnnnnnnnnnnnnnnnnnnnnnnnnnnnnnnnnnnnnnnnnnnnnnnnnnnnnnnnnnnnnnnnnnnnnnnnnnnnnnnnnnnnnnnnnnnnnnnnnnnnnnnnnnnnnnnnnnnnnnnnnnnnnnnnnnnnnnnnnnnnnnnnnnnnnnnnnnnnnnnnnnnnnnnnnnnnnnnnnnnnnnnnnnnnnnnnnnnnnnnnnnnnnnnnnnnnnnnnnnnnnnnnnnnnnnnnnnnnnnnnnnnnnnnnnnnnnnnnnnnnnnnnnnnnnnnnnnnnnnnnnnnnnnnnnnnnnnnnnnnnnnnnnnnnnnnnnnnnnnnnnnnnnnnnnnnnnnnnnnnnnnnnnnnnnnnnnnnnnnnnnnnnnnnnnnnnnnnnnnnnnnnnnnnnnnnnnnnnnnnnnnnnnnnnnnnnnnnnnnnnnnnnnnnnnnnnnnnnnnnnnnnnnnnnnnnnnnnnnnnnnnnnnnnnnnnnnnnnnnnnnnnnnnnnnnnnnnnnnnnnnnnnnnnnnnnnnnnnnnnnnnnnnnnnnnnnnnnnnnnnnnnnnnnnnnnnnnnnnnnnnnnnnnnnnnnnnnnnnnnnnnnnnnnnnnnnnnnnnnnnnnnnnnnnnnnnnnnnnnnnnnnnnnnnnnnnnnnnnnnnnnnnnnnnnnnnnnnnnnnnnnnnnnnnnnnnnnnnnnnnnnnnnnnnnnnnnnnnnnnnnnnnnnnnnnnnnnnnnnnnnnnnnnnnnnnnnnnnnnnnnnnnnnnnnnnnnnnnnnnnnnnnnnnnnnnnnnnnnnnnnnnnnnnnnnnnnnnnnnnnnnnnnnnnnnnnnnnnnnnnnnnnnnnnnnnnnnnnnnnnnnnnnnnnnnnnnnnnnnnnnnnnnnnnnnnnnnnnnnnnnnnnnnnnnnnnnnnnnnnnnnnnnnnnnnnnnnnnnnnnnnnnnnnnnnnnnnnnnnnnnnnnnnnnnnnnnnnnnnnnnnnnnnnnnnnnnnnnnnnnnnnnnnnnnnnnnnnnnnnnnnnnnnnnnnnnnnnnnnnnnnnnnnnnnnnnnnnnnnnnnnnnnnnnnnnnnnnnnnnnnnnnnnnnnnnnnnnnnnnnnnnnnnnnnnnnnnnnnnnnnnnnnnnnnnnnnnnnnnnnnnnnnnnnnnnnnnnnnnnnnnnnnnnnnnnnnnnnnnnnnnnnnnnnnnnnnnnnnnnnnnnnnnnnnnnnnnnnnnnnnnnnnnnnnnnnnnnnnnnnnnnnnnnnnnnnnnnnnnnnnnnnnnnnnnnnnnnnnnnnnnnnnnnnnnnnnnnnnnnnnnnnnnnnnnnnnnnnnnnnnnnnnnnnnnnnnnnnnnnnnnnnnnnnnnnnnnnnnnnnnnnnnnnnnnnnnnnnnnnnnnnnnnnnnnnnnnnnnnnnnnnnnnnnnnnnnnnnnnnnnnnnnnnnnnnnnnnnnnnnnnnnnnnnnnnnnnnnnnnnnnnnnnnnnnnnnnnnnnnnnnnnnnnnnnnnnnnnnnnnnnnnnnnnnnnnnnnnnnnnnnnnnnnnnnnnnnnnnnnnnnnnnnnnnnnnnnnnnnnnnnnnnnnnnnnnnnnnnnnnnnnnnnnnnnnnnnnnnnnnnnnnnnnnnnnnnnnnnnnnnnnnnnnnnnnnnnnnnnnnnnnnnnnnnnnnnnnnnnnnnnnnnnnnnnnnnnnnnnnnnnnnnnnnnnnnnnnnnnnnnnnnnnnnnnnnnnnnnnnnnnnnnnnnnnnnnnnnnnnnnnnnnnnnnnnnnnnnnnnnnnnnnnnnnnnnnnnnnnnnnnnnnnnnnnnnnnnnnnnnnnnnnnnnnnnnnnnnnnnnnnnnnnnnnnnnnnnnnnnnnnnnnnnnnnnnnnnnnnnnnnnnnnnnnnnnnnnnnnnnnnnnnnnnnnnnnnnnnnnnnnnnnnnnnnnnnnnnnnnnnnnnnnnnnnnnnnnnnnnnnnnnnnnnnnnnnnnnnnnnnnnnnnnnnnnnnnnnnnnnnnnnnnnnnnnnnnnnnnnnnnnnnnnnnnnnnnnnnnnnnnnnnnnnnnnnnnnnnnnnnnnnnnnnnnnnnnnnnnnnnnnnnnnnnnnnnnnnnnnnnnnnnnnnnnnnnnnnnnnnnnnnnnnnnnnnnnnnnnnnnnnnnnnnnnnnnnnnnnnnnnnnnnnnnnnnnnnnnnnnnnnnnnnnnnnnnnnnnnnnnnnnnnnnnnnnnnnnnnnnnnnnnnnnnnnnnnnnnnnnnnnnnnnnnnnnnnnnnnnnnnnnnnnnnnnnnnnnnnnnnnnnnnnnnnnnnnnnnnnnnnnnnnnnnnnnnnnnnnnnnnnnnnnnnnnnnnnnnnnnnnnnnnnnnnnnnnnnnnnnnnnnnnnnnnnnnnnnnnnnnnnnnnnnnnnnnnnnnnnnnnnnnnnnnnnnnnnnnnnnnnnnnnnnnnnnnnnnnnnnnnnnnnnnnnnnnnnnnnnnnnnnnnnnnnnnnnnnnnnnnnnnnnnnnnnnnnnnnnnnnnnnnnnnnnnnnnnnnnnnnnnnnnnnnnnnnnnnnnnnnnnnnnnnnnnnnnnnnnnnnnnnnnnnnnnnnnnnnnnnnnnnnnnnnnnnnnnnnnnnnnnnnnnnnnnnnnnnnnnnnnnnnnnnnnnnnnnnnnnnnnnnnnnnnnnnnnnnnnnnnnnnnnnnnnnnnnnnnnnnnnnnnnnnnnnnnnnnnnnnnnnnnnnnnnnnnnnnnnnnnnnnnnnnnnnnnnnnnnnnnnnnnnnnnnnnnnnnnnnnnnnnnnnnnnnnnnnnnnnnnnnnnnnnnnnnnnnnnnnnnnnnnnnnnnnnnnnnnnnnnnnnnnnnnnnnnnnnnnnnnnnnnnnnnnnnnnnnnnnnnnnnnnnnnnnnnnnnnnnnnnnnnnnnnnnnnnnnnnnnnnnnnnnnnnnnnnnnnnnnnnnnnnnnnnnnnnnnnnnnnnnnnnnnnnnnnnnnnnnnnnnnnnnnnnnnnnnnnnnnnnnnnnnnnnnnnnnnnnnnnnnnnnnnnnnnnnnnnnnnnnnnnnnnnnnnnnnnnnnnnnnnnnnnnnnnnnnnnnnnnnnnnnnnnnnnnnnnnnnnnnnnnnnnnnnnnnnnnnnnnnnnnnnnnnnnnnnnnnnnnnnnnnnnnnnnnnnnnnnnnnnnnnnnnnnnnnnnnnnnnnnnnnnnnnnnnnnnnnnnnnnnnnnnnnnnnnnnnnnnnnnnnnnnnnnnnnnnnnnnnnnnnnnnnnnnnnnnnnnnnnnnnnnnnnnnnnnnnnnnnnnnnnnnnnnnnnnnnnnnnnnnnnnnnnnnnnnnnnnnnnnnnnnnnnnnnnnnnnnnnnnnnnnnnnnnnnnnnnnnnnnnnnnnnnnnnnnnnnnnnnnnnnnnnnnnnnnnnnnnnnnnnnnnnnnnnnnnnnnnnnnnnnnnnnnnnnnnnnnnnnnnnnnnnnnnnnnnnnnnnnnnnnnnnnnnnnnnnnnnnnnnnnnnnnnnnnnnnnnnnnnnnnnnnnnnnnnnnnnnnnnnnnnnnnnnnnnnnnnnnnnnnnnnnnnnnnnnnnnnnnnnnnnnnnnnnnnnnnnnnnnnnnnnnnnnnnnnnnnnnnnnnnnnnnnnnnnnnnnnnnnnnnnnnnnnnnnnnnnnnnnnnnnnnnnnnnnnnnnnnnnnnnnnnnnnnnnnnnnnnnnnnnnnnnnnnnnnnnnnnnnnnnnnnnnnnnnnnnnnnnnnnnnnnnnnnnnnnnnnnnnnnnnnnnnnnnnnnnnnnnnnnnnnnnnnnnnnnnnnnnnnnnnnnnnnnnnnnnnnnnnnnnnnnnnnnnnnnnnnnnnnnnnnnnnnnnnnnnnnnnnnnnnnnnnnnnnnnnnnnnnnnnnnnnnnnnnnnnnnnnnnnnnnnnnnnnnnnnnnnnnnnnnnnnnnnnnnnnnnnnnnnnnnnnnnnnnnnnnnnnnnnnnnnnnnnnnnnnnnnnnnnnnnnnnnnnnnnnnnnnnnnnnnnnnnnnnnnnnnnnnnnnnnnnnnnnnnnnnnnnnnnnnnnnnnnnnnnnnnnnnnnnnnnnnnnnnnnnnnnnnnnnnnnnnnnnnnnnnnnnnnnnnnnnnnnnnnnnnnnnnnnnnnnnnnnnnnnnnnnnnnnnnnnnnnnnnnnnnnnnnnnnnnnnnnnnnnnnnnnnnnnnnnnnnnnnnnnnnnnnnnnnnnnnnnnnnnnnnnnnnnnnnnnnnnnnnnnnnnnnnnnnnnnnnnnnnnnnnnnnnnnnnnnnnnnnnnnnnnnnnnnnnnnnnnnnnnnnnnnnnnnnnnnnnnnnnnnnnnnnnnnnnnnnnnnnnnnnnnnnnnnnnnnnnnnnnnnnnnnnnnnnnnnnnnnnnnnnnnnnnnnnnnnnnnnnnnnnnnnnnnnnnnnnnnnnnnnnnnnnnnnnnnnnnnnnnnnnnnnnnnnnnnnnnnnnnnnnnnnnnnnnnnnnnnnnnnnnnnnnnnnnnnnnnnnnnnnnnnnnnnnnnnnnnnnnnnnnnnnnnnnnnnnnnnnnnnnnnnnnnnnnnnnnnnnnnnnnnnnnnnnnnnnnnnnnnnnnnnnnnnnnnnnnnnnnnnnnnnnnnnnnnnnnnnnnnnnnnnnnnnnnnnnnnnnnnnnnnnnnnnnnnnnnnnnnnnnnnnnnnnnnnnnnnnnnnnnnnnnnnnnnnnnnnnnnnnnnnnnnnnnnnnnnnnnnnnnnnnnnnnnnnnnnnnnnnnnnnnnnnnnnnnnnnnnnnnnnnnnnnnnnnnnnnnnnnnnnnnnnnnnnnnnnnnnnnnnnnnnnnnnnnnnnnnnnnnnnnnnnnnnnnnnnnnnnnnnnnnnnnnnnnnnnnnnnnnnnnnnnnnnnnnnnnnnnnnnnnnnnnnnnnnnnnnnnnnnnnnnnnnnnnnnnnnnnnnnnnnnnnnnnnnnnnnnnnnnnnnnnnnnnnnnnnnnnnnnnnnnnnnnnnnnnnnnnnnnnnnnnnnnnnnnnnnnnnnnnnnnnnnnnnnnnnnnnnnnnnnnnnnnnnnnnnnnnnnnnnnnnnnnnnnnnnnnnnnnnnnnnnnnnnnnnnnnnnnnnnnnnnnnnnnnnnnnnnnnnnnnnnnnnnnnnnnnnnnnnnnnnnnnnnnnnnnnnnnnnnnnnnnnnnnnnnnnnnnnnnnnnnnnnnnnnnnnnnnnnnnnnnnnnnnnnnnnnnnnnnnnnnnnnnnnnnnnnnnnnnnnnnnnnnnnnnnnnnnnnnnnnnnnnnnnnnnnnnnnnnnnnnnnnnnnnnnnnnnnnnnnnnnnnnnnnnnnnnnnnnnnnnnnnnnnnnnnnnnnnnnnnnnnnnnnnnnnnnnnnnnnnnnnnnnnnnnnnnnnnnnnnnnnnnnnnnnnnnnnnnnnnnnnnnnnnnnnnnnnnnnnnnnnnnnnnnnnnnnnnnnnnnnnnnnnnnnnnnnnnnnnnnnnnnnnnnnnnnnnnnnnnnnnnnnnnnnnnnnnnnnnnnnnnnnnnnnnnnnnnnnnnnnnnnnnnnnnnnnnnnnnnnnnnnnnnnnnnnnnnnnnnnnnnnnnnnnnnnnnnnnnnnnnnnnnnnnnnnnnnnnnnnnnnnnnnnnnnnnnnnnnnnnnnnnnnnnnnnnnnnnnnnnnnnnnnnnnnnnnnnnnnnnnnnnnnnnnnnnnnnnnnnnnnnnnnnnnnnnnnnnnnnnnnnnnnnnnnnnnnnnnnnnnnnnnnnnnnnnnnnnnnnnnnnnnnnnnnnnnnnnnnnnnnnnnnnnnnnnnnnnnnnnnnnnnnnnnnnnnnnnnnnnnnnnnnnnnnnnnnnnnnnnnnnnnnnnnnnnnnnnnnnnnnnnnnnnnnnnnnnnnnnnnnnnnnnnnnnnnnnnnnnnnnnnnnnnnnnnnnnnnnnnnnnnnnnnnnnnnnnnnnnnnnnnnnnnnnnnnnnnnnnnnnnnnnnnnnnnnnnnnnnnnnnnnnnnnnnnnnnnnnnnnnnnnnnnnnnnnnnnnnnnnnnnnnnnnnnnnnnnnnnnnnnnnnnnnnnnnnnnnnnnnnnnnnnnnnnnnnnnnnnnnnnnnnnnnnnnnnnnnnnnnnnnnnnnnnnnnnnnnnnnnnnnnnnnnnnnnnnnnnnnnnnnnnnnnnnnnnnnnnnnnnnnnnnnnnnnnnnnnnnnnnnnnnnnnnnnnnnnnnnnnnnnnnnnnnnnnnnnnnnnnnnnnnnnnnnnnnnnnnnnnnnnnnnnnnnnnnnnnnnnnnnnnnnnnnnnnnnnnnnnnnnnnnnnnnnnnnnnnnnnnnnnnnnnnnnnnnnnnnnnnnnnnnnnnnnnnnnnnnnnnnnnnnnnnnnnnnnnnnnnnnnnnnnnnnnnnnnnnnnnnnnnnnnnnnnnnnnnnnnnnnnnnnnnnnnnnnnnnnnnnnnnnnnnnnnnnnnnnnnnnnnnnnnnnnnnnnnnnnnnnnnnnnnnnnnnnnnnnnnnnnnnnnnnnnnnnnnnnnnnnnnnnnnnnnnnnnnnnnnnnnnnnnnnnnnnnnnnnnnnnnnnnnnnnnnnnnnnnnnnnnnnnnnnnnnnnnnnnnnnnnnnnnnnnnnnnnnnnnnnnnnnnnnnnnnnnnnnnnnnnnnnnnnnnnnnnnnnnnnnnnnnnnnnnnnnnnnnnnnnnnnnnnnnnnnnnnnnnnnnnnnnnnnnnnnnnnnnnnnnnnnnnnnnnnnnnnnnnnnnnnnnnnnnnnnnnnnnnnnnnnnnnnnnnnnnnnnnnnnnnnnnnnnnnnnnnnnnnnnnnnnnnnnnnnnnnnnnnnnnnnnnnnnnnnnnnnnnnnnnnnnnnnnnnnnnnnnnnnnnnnnnnnnnnnnnnnnnnnnnnnnnnnnnnnnnnnnnnnnnnnnnnnnnnnnnnnnnnnnnnnnnnnnnnnnnnnnnnnnnnnnnnnnnnnnnnnnnnnnnnnnnnnnnnnnnnnnnnnnnnnnnnnnnnnnnnnnnnnnnnnnnnnnnnnnnnnnnnnnnnnnnnnnnnnnnnnnnnnnnnnnnnnnnnnnnnnnnnnnnnnnnnnnnnnnnnnnnnnnnnnnnnnnnnnnnnnnnnnnnnnnnnnnnnnnnnnnnnnnnnnnnnnnnnnnnnnnnnnnnnnnnnnnnnnnnnnnnnnnnnnnnnnnnnnnnnnnnnnnnnnnnnnnnnnnnnnnnnnnnnnnnnnnnnnnnnnnnnnnnnnnnnnnnnnnnnnnnnnnnnnnnnnnnnnnnnnnnnnnnnnnnnnnnnnnnnnnnnnnnnnnnnnnnnnnnnnnnnnnnnnnnnnnnnnnnnnnnnnnnnnnnnnnnnnnnnnnnnnnnnnnnnnnnnnnnnnnnnnnnnnnnnnnnnnnnnnnnnnnnnnnnnnnnnnnnnnnnnnnnnnnnnnnnnnnnnnnnnnnnnnnnnnnnnnnnnnnnnnnnnnnnnnnnnnnnnnnnnnnnnnnnnnnnnnnnnnnnnnnnnnnnnnnnnnnnnnnnnnnnnnnnnnnnnnnnnnnnnnnnnnnnnnnnnnnnnnnnnnnnnnnnnnnnnnnnnnnnnnnnnnnnnnnnnnnnnnnnnnnnnnnnnnnnnnnnnnnnnnnnnnnnnnnnnnnnnnnnnnnnnnnnnnnnnnnnnnnnnnnnnnnnnnnnnnnnnnnnnnnnnnnnnnnnnnnnnnnnnnnnnnnnnnnnnnnnnnnnnnnnnnnnnnnnnnnnnnnnnnnnnnnnnnnnnnnnnnnnnnnnnnnnnnnnnnnnnnnnnnnnnnnnnnnnnnnnnnnnnnnnnnnnnnnnnnnnnnnnnnnnnnnnnnnnnnnnnnnnnnnnnnnnnnnnnnnnnnnnnnnnnnnnnnnnnnnnnnnnnnnnnnnnnnnnnnnnnnnnnnnnnnnnnnnnnnnnnnnnnnnnnnnnnnnnnnnnnnnnnnnnnnnnnnnnnnnnnnnnnnnnnnnnnnnnnnnnnnnnnnnnnnnnnnnnnnnnnnnnnnnnnnnnnnnnnnnnnnnnnnnnnnnnnnnnnnnnnnnnnnnnnnnnnnnnnnnnnnnnnnnnnnnnnnnnnnnnnnnnnnnnnnnnnnnnnnnnnnnnnnnnnnnnnnnnnnnnnnnnnnnnnnnnnnnnnnnnnnnnnnnnnnnnnnnnnnnnnnnnnnnnnnnnnnnnnnnnnnnnnnnnnnnnnnnnnnnnnnnnnnnnnnnnnnnnnnnnnnnnnnnnnnnnnnnnnnnnnnnnnnnnnnnnnnnnnnnnnnnnnnnnnnnnnnnnnnnnnnnnnnnnnnnnnnnnnnnnnnnnnnnnnnnnnnnnnnnnnnnnnnnnnnnnnnnnnnnnnnnnnnnnnnnnnnnnnnnnnnnnnnnnnnnnnnnnnnnnnnnnnnnnnnnnnnnnnnnnnnnnnnnnnnnnnnnnnnnnnnnnnnnnnnnnnnnnnnnnnnnnnnnnnnnnnnnnnnnnnnnnnnnnnnnnnnnnnnnnnnnnnnnnnnnnnnnnnnnnnnnnnnnnnnnnnnnnnnnnnnnnnnnnnnnnnnnnnnnnnnnnnnnnnnnnnnnnnnnnnnnnnnnnnnnnnnnnnnnnnnnnnnnnnnnnnnnnnnnnnnnnnnnnnnnnnnnnnnnnnnnnnnnnnnnnnnnnnnnnnnnnnnnnnnnnnnnnnnnnnnnnnnnnnnnnnnnnnnnnnnnnnnnnnnnnnnnnnnnnnnnnnnnnnnnnnnnnnnnnnnnnnnnnnnnnnnnnnnnnnnnnnnnnnnnnnnnnnnnnnnnnnnnnnnnnnnnnnnnnnnnnnnnnnnnnnnnnnnnnnnnnnnnnnnnnnnnnnnnnnnnnnnnnnnnnnnnnnnnnnnnnnnnnnnnnnnnnnnnnnnnnnnnnnnnnnnnnnnnnnnnnnnnnnnnnnnnnnnnnnnnnnnnnnnnnnnnnnnnnnnnnnnnnnnnnnnnnnnnnnnnnnnnnnnnnnnnnnnnnnnnnnnnnnnnnnnnnnnnnnnnnnnnnnnnnnnnnnnnnnnnnnnnnnnnnnnnnnnnnnnnnnnnnnnnnnnnnnnnnnnnnnnnnnnnnnnnnnnnnnnnnnnnnnnnnnnnnnnnnnnnnnnnnnnnnnnnnnnnnnnnnnnnnnnnnnnnnnnnnnnnnnnnnnnnnnnnnnnnnnnnnnnnnnnnnnnnnnnnnnnnnnnnnnnnnnnnnnnnnnnnnnnnnnnnnnnnnnnnnnnnnnnnnnnnnnnnnnnnnnnnnnnnnnnnnnnnnnnnnnnnnnnnnnnnnnnnnnnnnnnnnnnnnnnnnnnnnnnnnnnnnnnnnnnnnnnnnnnnnnnnnnnnnnnnnnnnnnnnnnnnnnnnnnnnnnnnnnnnnnnnnnnnnnnnnnnnnnnnnnnnnnnnnnnnnnnnnnnnnnnnnnnnnnnnnnnnnnnnnnnnnnnnnnnnnnnnnnnnnnnnnnnnnnnnnnnnnnnnnnnnnnnnnnnnnnnnnnnnnnnnnnnnnnnnnnnnnnnnnnnnnnnnnnnnnnnnnnnnnnnnnnnnnnnnnnnnnnnnnnnnnnnnnnnnnnnnnnnnnnnnnnnnnnnnnnnnnnnnnnnnnnnnnnnnnnnnnnnnnnnnnnnnnnnnnnnnnnnnnnnnnnnnnnnnnnnnnnnnnnnnnnnnnnnnnnnnnnnnnnnnnnnnnnnnnnnnnnnnnnnnnnnnnnnnnnnnnnnnnnnnnnnnnnnnnnnnnnnnnnnnnnnnnnnnnnnnnnnnnnnnnnnnnnnnnnnnnnnnnnnnnnnnnnnnnnnnnnnnnnnnnnnnnnnnnnnnnnnnnnnnnnnnnnnnnnnnnnnnnnnnnnnnnnnnnnnnnnnnnnnnnnnnnnnnnnnnnnnnnnnnnnnnnnnnnnnnnnnnnnnnnnnnnnnnnnnnnnnnnnnnnnnnnnnnnnnnnnnnnnnnnnnnnnnnnnnnnnnnnnnnnnnnnnnnnnnnnnnnnnnnnnnnnnnnnnnnnnnnnnnnnnnnnnnnnnnnnnnnnnnnnnnnnnnnnnnnnnnnnnnnnnnnnnnnnnnnnnnnnnnnnnnnnnnnnnnnnnnnnnnnnnnnnnnnnnnnnnnnnnnnnnnnnnnnnnnnnnnnnnnnnnnnnnnnnnnnnnnnnnnnnnnnnnnnnnnnnnnnnnnnnnnnnnnnnnnnnnnnnnnnnnnnnnnnnnnnnnnnnnnnnnnnnnnnnnnnnnnnnnnnnnnnnnnnnnnnnnnnnnnnnnnnnnnnnnnnnnnnnnnnnnnnnnnnnnnnnnnnnnnnnnnnnnnnnnnnnnnnnnnnnnnnnnnnnnnnnnnnnnnnnnnnnnnnnnnnnnnnnnnnnnnnnnnnnnnnnnnnnnnnnnnnnnnnnnnnnnnnnnnnnnnnnnnnnnnnnnnnnnnnnnnnnnnnnnnnnnnnnnnnnnnnnnnnnnnnnnnnnnnnnnnnnnnnnnnnnnnnnnnnnnnnnnnnnnnnnnnnnnnnnnnnnnnnnnnnnnnnnnnnnnnnnnnnnnnnnnnnnnnnnnnnnnnnnnnnnnnnnnnnnnnnnnnnnnnnnnnnnnnnnnnnnnnnnnnnnnnnnnnnnnnnnnnnnnnnnnnnnnnnnnnnnnnnnnnnnnnnnnnnnnnnnnnnnnnnnnnnnnnnnnnnnnnnnnnnnnnnnnnnnnnnnnnnnnnnnnnnnnnnnnnnnnnnnnnnnnnnnnnnnnnnnnnnnnnnnnnnnnnnnnnnnnnnnnnnnnnnnnnnnnnnnnnnnnnnnnnnnnnnnnnnnnnnnnnnnnnnnnnnnnnnnnnnnnnnnnnnnnnnnnnnnnnnnnnnnnnnnnnnnnnnnnnnnnnnnnnnnnnnnnnnnnnnnnnnnnnnnnnnnnnnnnnnnnnnnnnnnnnnnnnnnnnnnnnnnnnnnnnnnnnnnnnnnnnnnnnnnnnnnnnnnnnnnnnnnnnnnnnnnnnnnnnnnnnnnnnnnnnnnnnnnnnnnnnnnnnnnnnnnnnnnnnnnnnnnnnnnnnnnnnnnnnnnnnnnnnnnnnnnnnnnnnnnnnnnnnnnnnnnnnnnnnnnnnnnnnnnnnnnnnnnnnnnnnnnnnnnnnnnnnnnnnnnnnnnnnnnnnnnnnnnnnnnnnnnnnnnnnnnnnnnnnnnnnnnnnnnnnnnnnnnnnnnnnnnnnnnnnnnnnnnnnnnnnnnnnnnnnnnnnnnnnnnnnnnnnnnnnnnnnnnnnnnnnnnnnnnnnnnnnnnnnnnnnnnnnnnnnnnnnnnnnnnnnnnnnnnnnnnnnnnnnnnnnnnnnnnnnnnnnnnnnnnnnnnnnnnnnnnnnnnnnnnnnnnnnnnnnnnnnnnnnnnnnnnnnnnnnnnnnnnnnnnnnnnnnnnnnnnnnnnnnnnnnnnnnnnnnnnnnnnnnnnnnnnnnnnnnnnnnnnnnnnnnnnnnnnnnnnnnnnnnnnnnnnnnnnnnnnnnnnnnnnnnnnnnnnnnnnnnnnnnnnnnnnnnnnnnnnnnnnnnnnnnnnnnnnnnnnnnnnnnnnnnnnnnnnnnnnnnnnnnnnnnnnnnnnnnnnnnnnnnnnnnnnnnnnnnnnnnnnnnnnnnnnnnnnnnnnnnnnnnnnnnnnnnnnnnnnnnnnnnnnnnnnnnnnnnnnnnnnnnnnnnnnnnnnnnnnnnnnnnnnnnnnnnnnnnnnnnnnnnnnnnnnnnnnnnnnnnnnnnnnnnnnnnnnnnnnnnnnnnnnnnnnnnnnnnnnnnnnnnnnnnnnnnnnnnnnnnnnnnnnnnnnnnnnnnnnnnnnnnnnnnnnnnnnnnnnnnnnnnnnnnnnnnnnnnnnnnnnnnnnnnnnnnnnnnnnnnnnnnnnnnnnnnnnnnnnnnnnnnnnnnnnnnnnnnnnnnnnnnnnnnnnnnnnnnnnnnnnnnnnnnnnnnnnnnnnnnnnnnnnnnnnnnnnnnnnnnnnnnnnnnnnnnnnnnnnnnnnnnnnnnnnnnnnnnnnnnnnnnnnnnnnnnnnnnnnnnnnnnnnnnnnnnnnnnnnnnnnnnnnnnnnnnnnnnnnnnnnnnnnnnnnnnnnnnnnnnnnnnnnnnnnnnnnnnnnnnnnnnnnnnnnnnnnnnnnnnnnnnnnnnnnnnnnnnnnnnnnnnnnnnnnnnnnnnnnnnnnnnnnnnnnnnnnnnnnnnnnnnnnnnnnnnnnnnnnnnnnnnnnnnnnnnnnnnnnnnnnnnnnnnnnnnnnnnnnnnnnnnnnnnnnnnnnnnnnnnnnnnnnnnnnnnnnnnnnnnnnnnnnnnnnnnnnnnnnnnnnnnnnnnnnnnnnnnnnnnnnnnnnnnnnnnnnnnnnnnnnnnnnnnnnnnnnnnnnnnnnnnnnnnnnnnnnnnnnnnnnnnnnnnnnnnnnnnnnnnnnnnnnnnnnnnnnnnnnnnnnnnnnnnnnnnnnnnnnnnnnnnnnnnnnnnnnnnnnnnnnnnnnnnnnnnnnnnnnnnnnnnnnnnnnnnnnnnnnnnnnnnnnnnnnnnnnnnnnnnnnnnnnnnnnnnnnnnnnnnnnnnnnnnnnnnnnnnnnnnnnnnnnnnnnnnnnnnnnnnnnnnnnnnnnnnnnnnnnnnnnnnnnnnnnnnnnnnnnnnnnnnnnnnnnnnnnnnnnnnnnnnnnnnnnnnnnnnnnnnnnnnnnnnnnnnnnnnnnnnnnnnnnnnnnnnnnnnnnnnnnnnnnnnnnnnnnnnnnnnnnnnnnnnnnnnnnnnnnnnnnnnnnnnnnnnnnnnnnnnnnnnnnnnnnnnnnnnnnnnnnnnnnnnnnnnnnnnnnnnnnnnnnnnnnnnnnnnnnnnnnnnnnnnnnnnnnnnnnnnnnnnnnnnnnnnnnnnnnnnnnnnnnnnnnnnnnnnnnnnnnnnnnnnnnnnnnnnnnnnnnnnnnnnnnnnnnnnnnnnnnnnnnnnnnnnnnnnnnnnnnnnnnnnnnnnnnnnnnnnnnnnnnnnnnnnnnnnnnnnnnnnnnnnnnnnnnnnnnnnnnnnnnnnnnnnnnnnnnnnnnnnnnnnnnnnnnnnnnnnnnnnnnnnnnnnnnnnnnnnnnnnnnnnnnnnnnnnnnnnnnnnnnnnnnnnnnnnnnnnnnnnnnnnnnnnnnnnnnnnnnnnnnnnnnnnnnnnnnnnnnnnnnnnnnnnnnnnnnnnnnnnnnnnnnnnnnnnnnnnnnnnnnnnnnnnnnnnnnnnnnnnnnnnnnnnnnnnnnnnnnnnnnnnnnnnnnnnnnnnnnnnnnnnnnnnnnnnnnnnnnnnnnnnnnnnnnnnnnnnnnnnnnnnnnnnnnnnnnnnnnnnnnnnnnnnnnnnnnnnnnnnnnnnnnnnnnnnnnnnnnnnnnnnnnnnnnnnnnnnnnnnnnnnnnnnnnnnnnnnnnnnnnnnnnnnnnnnnnnnnnnnnnnnnnnnnnnnnnnnnnnnnnnnnnnnnnnnnnnnnnnnnnnnnnnnnnnnnnnnnnnnnnnnnnnnnnnnnnnnnnnnnnnnnnnnnnnnnnnnnnnnnnnnnnnnnnnnnnnnnnnnnnnnnnnnnnnnnnnnnnnnnnnnnnnnnnnnnnnnnnnnnnnnnnnnnnnnnnnnnnnnnnnnnnnnnnnnnnnnnnnnnnnnnnnnnnnnnnnnnnnnnnnnnnnnnnnnnnnnnnnnnnnnnnnnnnnnnnnnnnnnnnnnnnnnnnnnnnnnnnnnnnnnnnnnnnnnnnnnnnnnnnnnnnnnnnnnnnnnnnnnnnnnnnnnnnnnnnnnnnnnnnnnnnnnnnnnnnnnnnnnnnnnnnnnnnnnnnnnnnnnnnnnnnnnnnnnnnnnnnnnnnnnnnnnnnnnnnnnnnnnnnnnnnnnnnnnnnnnnnnnnnnnnnnnnnnnnnnnnnnnnnnnnnnnnnnnnnnnnnnnnnnnnnnnnnnnnnnnnnnnnnnnnnnnnnnnnnnnnnnnnnnnnnnnnnnnnnnnnnnnnnnnnnnnnnnnnnnnnnnnnnnnnnnnnnnnnnnnnnnnnnnnnnnnnnnnnnnnnnnnnnnnnnnnnnnnnnnnnnnnnnnnnnnnnnnnnnnnnnnnnnnnnnnnnnnnnnnnnnnnnnnnnnnnnnnnnnnnnnnnnnnnnnnnnnnnnnnnnnnnnnnnnnnnnnnnnnnnnnnnnnnnnnnnnnnnnnnnnnnnnnnnnnnnnnnnnnnnnnnnnnnnnnnnnnnnnnnnnnnnnnnnnnnnnnnnnnnnnnnnnnnnnnnnnnnnnnnnnnnnnnnnnnnnnnnnnnnnnnnnnnnnnnnnnnnnnnnnnnnnnnnnnnnnnnnnnnnnnnnnnnnnnnnnnnnnnnnnnnnnnnnnnnnnnnnnnnnnnnnnnnnnnnnnnnnnnnnnnnnnnnnnnnnnnnnnnnnnnnnnnnnnnnnnnnnnnnnnnnnnnnnnnnnnnnnnnnnnnnnnnnnnnnnnnnnnnnnnnnnnnnnnnnnnnnnnnnnnnnnnnnnnnnnnnnnnnnnnnnnnnnnnnnnnnnnnnnnnnnnnnnnnnnnnnnnnnnnnnnnnnnnnnnnnnnnnnnnnnnnnnnnnnnnnnnnnnnnnnnnnnnnnnnnnnnnnnnnnnnnnnnnnnnnnnnnnnnnnnnnnnnnnnnnnnnnnnnnnnnnnnnnnnnnnnnnnnnnnnnnnnnnnnnnnnnnnnnnnnnnnnnnnnnnnnnnnnnnnnnnnnnnnnnnnnnnnnnnnnnnnnnnnnnnnnnnnnnnnnnnnnnnnnnnnnnnnnnnnnnnnnnnnnnnnnnnnnnnnnnnnnnnnnnnnnnnnnnnnnnnnnnnnnnnnnnnnnnnnnnnnnnnnnnnnnnnnnnnnnnnnnnnnnnnnnnnnnnnnnnnnnnnnnnnnnnnnnnnnnnnnnnnnnnnnnnnnnnnnnnnnnnnnnnnnnnnnnnnnnnnnnnnnnnnnnnnnnnnnnnnnnnnnnnnnnnnnnnnnnnnnnnnnnnnnnnnnnnnnnnnnnnnnnnnnnnnnnnnnnnnnnnnnnnnnnnnnnnnnnnnnnnnnnnnnnnnnnnnnnnnnnnnnnnnnnnnnnnnnnnnnnnnnnnnnnnnnnnnnnnnnnnnnnnnnnnnnnnnnnnnnnnnnnnnnnnnnnnnnnnnnnnnnnnnnnnnnnnnnnnnnnnnnnnnnnnnnnnnnnnnnnnnnnnnnnnnnnnnnnnnnnnnnnnnnnnnnnnnnnnnnnnnnnnnnnnnnnnnnnnnnnnnnnnnnnnnnnnnnnnnnnnnnnnnnnnnnnnnnnnnnnnnnnnnnnnnnnnnnnnnnnnnnnnnnnnnnnnnnnnnnnnnnnnnnnnnnnnnnnnnnnnnnnnnnnnnnnnnnnnnnnnnnnnnnnnnnnnnnnnnnnnnnnnnnnnnnnnnnnnnnnnnnnnnnnnnnnnnnnnnnnnnnnnnnnnnnnnnnnnnnnnnnnnnnnnnnnnnnnnnnnnnnnnnnnnnnnnnnnnnnnnnnnnnnnnnnnnnnnnnnnnnnnnnnnnnnnnnnnnnnnnnnnnnnnnnnnnnnnnnnnnnnnnnnnnnnnnnnnnnnnnnnnnnnnnnnnnnnnnnnnnnnnnnnnnnnnnnnnnnnnnnnnnnnnnnnnnnnnnnnnnnnnnnnnnnnnnnnnnnnnnnnnnnnnnnnnnnnnnnnnnnnnnnnnnnnnnnnnnnnnnnnnnnnnnnnnnnnnnnnnnnnnnnnnnnnnnnnnnnnnnnnnnnnnnnnnnnnnnnnnnnnnnnnnnnnnnnnnnnnnnnnnnnnnnnnnnnnnnnnnnnnnnnnnnnnnnnnnnnnnnnnnnnnnnnnnnnnnnnnnnnnnnnnnnnnnnnnnnnnnnnnnnnnnnnnnnnnnnnnnnnnnnnnnnnnnnnnnnnnnnnnnnnnnnnnnnnnnnnnnnnnnnnnnnnnnnnnnnnnnnnnnnnnnnnnnnnnnnnnnnnnnnnnnnnnnnnnnnnnnnnnnnnnnnnnnnnnnnnnnnnnnnnnnnnnnnnnnnnnnnnnnnnnnnnnnnnnnnnnnnnnnnnnnnnnnnnnnnnnnnnnnnnnnnnnnnnnnnnnnnnnnnnnnnnnnnnnnnnnnnnnnnnnnnnnnnnnnnnnnnnnnnnnnnnnnnnnnnnnnnnnnnnnnnnnnnnnnnnnnnnnnnnnnnnnnnnnnnnnnnnnnnnnnnnnnnnnnnnnnnnnnnnnnnnnnnnnnnnnnnnnnnnnnnnnnnnnnnnnnnnnnnnnnnnnnnnnnnnnnnnnnnnnnnnnnnnnnnnnnnnnnnnnnnnnnnnnnnnnnnnnnnnnnnnnnnnnnnnnnnnnnnnnnnnnnnnnnnnnnnnnnnnnnnnnnnnnnnnnnnnnnnnnnnnnnnnnnnnnnnnnnnnnnnnnnnnnnnnnnnnnnnnnnnnnnnnnnnnnnnnnnnnnnnnnnnnnnnnnnnnnnnnnnnnnnnnnnnnnnnnnnnnnnnnnnnnnnnnnnnnnnnnnnnnnnnnnnnnnnnnnnnnnnnnnnnnnnnnnnnnnnnnnnnnnnnnnnnnnnnnnnnnnnnnnnnnnnnnnnnnnnnnnnnnnnnnnnnnnnnnnnnnnnnnnnnnnnnnnnnnnnnnnnnnnnnnnnnnnnnnnnnnnnnnnnnnnnnnnnnnnnnnnnnnnnnnnnnnnnnnnnnnnnnnnnnnnnnnnnnnnnnnnnnnnnnnnnnnnnnnnnnnnnnnnnnnnnnnnnnnnnnnnnnnnnnnnnnnnnnnnnnnnnnnnnnnnnnnnnnnnnnnnnnnnnnnnnnnnnnnnnnnnnnnnnnnnnnnnnnnnnnnnnnnnnnnnnnnnnnnnnnnnnnnnnnnnnnnnnnnnnnnnnnnnnnnnnnnnnnnnnnnnnnnnnnnnnnnnnnnnnnnnnnnnnnnnnnnnnnnnnnnnnnnnnnnnnnnnnnnnnnnnnnnnnnnnnnnnnnnnnnnnnnnnnnnnnnnnnnnnnnnnnnnnnnnnnnnnnnnnnnnnnnnnnnnnnnnnnnnnnnnnnnnnnnnnnnnnnnnnnnnnnnnnnnnnnnnnnnnnnnnnnnnnnnnnnnnnnnnnnnnnnnnnnnnnnnnnnnnnnnnnnnnnnnnnnnnnnnnnnnnnnnnnnnnnnnnnnnnnnnnnnnnnnnnnnnnnnnnnnnnnnnnnnnnnnnnnnnnnnnnnnnnnnnnnnnnnnnnnnnnnnnnnnnnnnnnnnnnnnnnnnnnnnnnnnnnnnnnnnnnnnnnnnnnnnnnnnnnnnnnnnnnnnnnnnnnnnnnnnnnnnnnnnnnnnnnnnnnnnnnnnnnnnnnnnnnnnnnnnnnnnnnnnnnnnnnnnnnnnnnnnnnnnnnnnnnnnnnnnnnnnnnnnnnnnnnnnnnnnnnnnnnnnnnnnnnnnnnnnnnnnnnnnnnnnnnnnnnnnnnnnnnnnnnnnnnnnnnnnnnnnnnnnnnnnnnnnnnnnnnnnnnnnnnnnnnnnnnnnnnnnnnnnnnnnnnnnnnnnnnnnnnnnnnnnnnnnnnnnnnnnnnnnnnnnnnnnnnnnnnnnnnnnnnnnnnnnnnnnnnnnnnnnnnnnnnnnnnnnnnnnnnnnnnnnnnnnnnnnnnnnnnnnnnnnnnnnnnnnnnnnnnnnnnnnnnnnnnnnnnnnnnnnnnnnnnnnnnnnnnnnnnnnnnnnnnnnnnnnnnnnnnnnnnnnnnnnnnnnnnnnnnnnnnnnnnnnnnnnnnnnnnnnnnnnnnnnnnnnnnnnnnnnnnnnnnnnnnnnnnnnnnnnnnnnnnnnnnnnnnnnnnnnnnnnnnnnnnnnnnnnnnnnnnnnnnnnnnnnnnnnnnnnnnnnnnnnnnnnnnnnnnnnnnnnnnnnnnnnnnnnnnnnnnnnnnnnnnnnnnnnnnnnnnnnnnnnnnnnnnnnnnnnnnnnnnnnnnnnnnnnnnnnnnnnnnnnnnnnnnnnnnnnnnnnnnnnnnnnnnnnnnnnnnnnnnnnnnnnnnnnnnnnnnnnnnnnnnnnnnnnnnnnnnnnnnnnnnnnnnnnnnnnnnnnnnnnnnnnnnnnnnnnnnnnnnnnnnnnnnnnnnnnnnnnnnnnnnnnnnnnnnnnnnnnnnnnnnnnnnnnnnnnnnnnnnnnnnnnnnnnnnnnnnnnnnnnnnnnnnnnnnnnnnnnnnnnnnnnnnnnnnnnnnnnnnnnnnnnnnnnnnnnnnnnnnnnnnnnnnnnnnnnnnnnnnnnnnnnnnnnnnnnnnnnnnnnnnnnnnnnnnnnnnnnnnnnnnnnnnnnnnnnnnnnnnnnnnnnnnnnnnnnnnnnnnnnnnnnnnnnnnnnnnnnnnnnnnnnnnnnnnnnnnnnnnnnnnnnnnnnnnnnnnnnnnnnnnnnnnnnnnnnnnnnnnnnnnnnnnnnnnnnnnnnnnnnnnnnnnnnnnnnnnnnnnnnnnnnnnnnnnnnnnnnnnnnnnnnnnnnnnnnnnnnnnnnnnnnnnnnnnnnnnnnnnnnnnnnnnnnnnnnnnnnnnnnnnnnnnnnnnnnnnnnnnnnnnnnnnnnnnnnnnnnnnnnnnnnnnnnnnnnnnnnnnnnnnnnnnnnnnnnnnnnnnnnnnnnnnnnnnnnnnnnnnnnnnnnnnnnnnnnnnnnnnnnnnnnnnnnnnnnnnnnnnnnnnnnnnnnnnnnnnnnnnnnnnnnnnnnnnnnnnnnnnnnnnnnnnnnnnnnnnnnnnnnnnnnnnnnnnnnnnnnnnnnnnnnnnnnnnnnnnnnnnnnnnnnnnnnnnnnnnnnnnnnnnnnnnnnnnnnnnnnnnnnnnnnnnnnnnnnnnnnnnnnnnnnnnnnnnnnnnnnnnnnnnnnnnnnnnnnnnnnnnnnnnnnnnnnnnnnnnnnnnnnnnnnnnnnnnnnnnnnnnnnnnnnnnnnnnnnnnnnnnnnnnnnnnnnnnnnnnnnnnnnnnnnnnnnnnnnnnnnnnnnnnnnnnnnnnnnnnnnnnnnnnnnnnnnnnnnnnnnnnnnnnnnnnnnnnnnnnnnnnnnnnnnnnnnnnnnnnnnnnnnnnnnnnnnnnnnnnnnnnnnnnnnnnnnnnnnnnnnnnnnnnnnnnnnnnnnnnnnnnnnnnnnnnnnnnnnnnnnnnnnnnnnnnnnnnnnnnnnnnnnnnnnnnnnnnnnnnnnnnnnnnnnnnnnnnnnnnnnnnnnnnnnnnnnnnnnnnnnnnnnnnnnnnnnnnnnnnnnnnnnnnnnnnnnnnnnnnnnnnnnnnnnnnnnnnnnnnnnnnnnnnnnnnnnnnnnnnnnnnnnnnnnnnnnnnnnnnnnnnnnnnnnnnnnnnnnnnnnnnnnnnnnnnnnnnnnnnnnnnnnnnnnnnnnnnnnnnnnnnnnnnnnnnnnnnnnnnnnnnnnnnnnnnnnnnnnnnnnnnnnnnnnnnnnnnnnnnnnnnnnnnnnnnnnnnnnnnnnnnnnnnnnnnnnnnnnnnnnnnnnnnnnnnnnnnnnnnnnnnnnnnnnnnnnnnnnnnnnnnnnnnnnnnnnnnnnnnnnnnnnnnnnnnnnnnnnnnnnnnnnnnnnnnnnnnnnnnnnnnnnnnnnnnnnnnnnnnnnnnnnnnnnnnnnnnnnnnnnnnnnnnnnnnnnnnnnnnnnnnnnnnnnnnnnnnnnnnnnnnnnnnnnnnnnnnnnnnnnnnnnnnnnnnnnnnnnnnnnnnnnnnnnnnnnnnnnnnnnnnnnnnnnnnnnnnnnnnnnnnnnnnnnnnnnnnnnnnnnnnnnnnnnnnnnnnnnnnnnnnnnnnnnnnnnnnnnnnnnnnnnnnnnnnnnnnnnnnnnnnnnnnnnnnnnnnnnnnnnnnnnnnnnnnnnnnnnnnnnnnnnnnnnnnnnnnnnnnnnnnnnnnnnnnnnnnnnnnnnnnnnnnnnnnnnnnnnnnnnnnnnnnnnnnnnnnnnnnnnnnnnnnnnnnnnnnnnnnnnnnnnnnnnnnnnnnnnnnnnnnnnnnnnnnnnnnnnnnnnnnnnnnnnnnnnnnnnnnnnnnnnnnnnnnnnnnnnnnnnnnnnnnnnnnnnnnnnnnnnnnnnnnnnnnnnnnnnnnnnnnnnnnnnnnnnnnnnnnnnnnnnnnnnnnnnnnnnnnnnnnnnnnnnnnnnnnnnnnnnnnnnnnnnnnnnnnnnnnnnnnnnnnnnnnnnnnnnnnnnnnnnnnnnnnnnnnnnnnnnnnnnnnnnnnnnnnnnnnnnnnnnnnnnnnnnnnnnnnnnnnnnnnnnnnnnnnnnnnnnnnnnnnnnnnnnnnnnnnnnnnnnnnnnnnnnnnnnnnnnnnnnnnnnnnnnnnnnnnnnnnnnnnnnnnnnnnnnnnnnnnnnnnnnnnnnnnnnnnnnnnnnnnnnnnnnnnnnnnnnnnnnnnnnnnnnnnnnnnnnnnnnnnnnnnnnnnnnnnnnnnnnnnnnnnnnnnnnnnnnnnnnnnnnnnnnnnnnnnnnnnnnnnnnnnnnnnnnnnnnnnnnnnnnnnnnnnnnnnnnnnnnnnnnnnnnnnnnnnnnnnnnnnnnnnnnnnnnnnnnnnnnnnnnnnnnnnnnnnnnnnnnnnnnnnnnnnnnnnnnnnnnnnnnnnnnnnnnnnnnnnnnnnnnnnnnnnnnnnnnnnnnnnnnnnnnnnnnnnnnnnnnnnnnnnnnnnnnnnnnnnnnnnnnnnnnnnnnnnnnnnnnnnnnnnnnnnnnnnnnnnnnnnnnnnnnnnnnnnnnnnnnnnnnnnnnnnnnnnnnnnnnnnnnnnnnnnnnnnnnnnnnnnnnnnnnnnnnnnnnnnnnnnnnnnnnnnnnnnnnnnnnnnnnnnnnnnnnnnnnnnnnnnnnnnnnnnnnnnnnnnnnnnnnnnnnnnnnnnnnnnnnnnnnnnnnnnnnnnnnnnnnnnnnnnnnnnnnnnnnnnnnnnnnnnnnnnnnnnnnnnnnnnnnnnnnnnnnnnnnnnnnnnnnnnnnnnnnnnnnnnnnnnnnnnnnnnnnnnnnnnnnnnnnnnnnnnnnnnnnnnnnnnnnnnnnnnnnnnnnnnnnnnnnnnnnnnnnnnnnnnnnnnnnnnnnnnnnnnnnnnnnnnnnnnnnnnnnnnnnnnnnnnnnnnnnnnnnnnnnnnnnnnnnnnnnnnnnnnnnnnnnnnnnnnnnnnnnnnnnnnnnnnnnnnnnnnnnnnnnnnnnnnnnnnnnnnnnnnnnnnnnnnnnnnnnnnnnnnnnnnnnnnnnnnnnnnnnnnnnnnnnnnnnnnnnnnnnnnnnnnnnnnnnnnnnnnnnnnnnnnnnnnnnnnnnnnnnnnnnnnnnnnnnnnnnnnnnnnnnnnnnnnnnnnnnnnnnnnnnnnnnnnnnnnnnnnnnnnnnnnnnnnnnnnnnnnnnnnnnnnnnnnnnnnnnnnnnnnnnnnnnnnnnnnnnnnnnnnnnnnnnnnnnnnnnnnnnnnnnnnnnnnnnnnnnnnnnnnnnnnnnnnnnnnnnnnnnnnnnnnnnnnnnnnnnnnnnnnnnnnnnnnnnnnnnnnnnnnnnnnnnnnnnnnnnnnnnnnnnnnnnnnnnnnnnnnnnnnnnnnnnnnnnnnnnnnnnnnnnnnnnnnnnnnnnnnnnnnnnnnnnnnnnnnnnnnnnnnnnnnnnnnnnnnnnnnnnnnnnnnnnnnnnnnnnnnnnnnnnnnnnnnnnnnnnnnnnnnnnnnnnnnnnnnnnnnnnnnnnnnnnnnnnnnnnnnnnnnnnnnnnnnnnnnnnnnnnnnnnnnnnnnnnnnnnnnnnnnnnnnnnnnnnnnnnnnnnnnnnnnnnnnnnnnnnnnnnnnnnnnnnnnnnnnnnnnnnnnnnnnnnnnnnnnnnnnnnnnnnnnnnnnnnnnnnnnnnnnnnnnnnnnnnnnnnnnnnnnnnnnnnnnnnnnnnnnnnnnnnnnnnnnnnnnnnnnnnnnnnnnnnnnnnnnnnnnnnnnnnnnnnnnnnnnnnnnnnnnnnnnnnnnnnnnnnnnnnnnnnnnnnnnnnnnnnnnnnnnnnnnnnnnnnnnnnnnnnnnnnnnnnnnnnnnnnnnnnnnnnnnnnnnnnnnnnnnnnnnnnnnnnnnnnnnnnnnnnnnnnnnnnnnnnnnnnnnnnnnnnnnnnnnnnnnnnnnnnnnnnnnnnnnnnnnnnnnnnnnnnnnnnnnnnnnnnnnnnnnnnnnnnnnnnnnnnnnnnnnnnnnnnnnnnnnnnnnnnnnnnnnnnnnnnnnnnnnnnnnnnnnnnnnnnnnnnnnnnnnnnnnnnnnnnnnnnnnnnnnnnnnnnnnnnnnnnnnnnnnnnnnnnnnnnnnnnnnnnnnnnnnnnnnnnnnnnnnnnnnnnnnnnnnnnnnnnnnnnnnnnnnnnnnnnnnnnnnnnnnnnnnnnnnnnnnnnnnnnnnnnnnnnnnnnnnnnnnnnnnnnnnnnnnnnnnnnnnnnnnnnnnnnnnnnnnnnnnnnnnnnnnnnnnnnnnnnnnnnnnnnnnnnnnnnnnnnnnnnnnnnnnnnnnnnnnnnnnnnnnnnnnnnnnnnnnnnnnnnnnnnnnnnnnnnnnnnnnnnnnnnnnnnnnnnnnnnnnnnnnnnnnnnnnnnnnnnnnnnnnnnnnnnnnnnnnnnnnnnnnnnnnnnnnnnnnnnnnnnnnnnnnnnnnnnnnnnnnnnnnnnnnnnnnnnnnnnnnnnnnnnnnnnnnnnnnnnnnnnnnnnnnnnnnnnnnnnnnnnnnnnnnnnnnnnnnnnnnnnnnnnnnnnnnnnnnnnnnnnnnnnnnnnnnnnnnnnnnnnnnnnnnnnnnnnnnnnnnnnnnnnnnnnnnnnnnnnnnnnnnnnnnnnnnnnnnnnnnnnnnnnnnnnnnnnnnnnnnnnnnnnnnnnnnnnnnnnnnnnnnnnnnnnnnnnnnnnnnnnnnnnnnnnnnnnnnnnnnnnnnnnnnnnnnnnnnnnnnnnnnnnnnnnnnnnnnnnnnnnnnnnnnnnnnnnnnnnnnnnnnnnnnnnnnnnnnnnnnnnnnnnnnnnnnnnnnnnnnnnnnnnnnnnnnnnnnnnnnnnnnnnnnnnnnnnnnnnnnnnnnnnnnnnnnnnnnnnnnnnnnnnnnnnnnnnnnnnnnnnnnnnnnnnnnnnnnnnnnnnnnnnnnnnnnnnnnnnnnnnnnnnnnnnnnnnnnnnnnnnnnnnnnnnnnnnnnnnnnnnnnnnnnnnnnnnnnnnnnnnnnnnnnnnnnnnnnnnnnnnnnnnnnnnnnnnnnnnnnnnnnnnnnnnnnnnnnnnnnnnnnnnnnnnnnnnnnnnnnnnnnnnnnnnnnnnnnnnnnnnnnnnnnnnnnnnnnnnnnnnnnnnnnnnnnnnnnnnnnnnnnnnnnnnnnnnnnnnnnnnnnnnnnnnnnnnnnnnnnnnnnnnnnnnnnnnnnnnnnnnnnnnnnnnnnnnnnnnnnnnnnnnnnnnnnnnnnnnnnnnnnnnnnnnnnnnnnnnnnnnnnnnnnnnnnnnnnnnnnnnnnnnnnnnnnnnnnnnnnnnnnnnnnnnnnnnnnnnnnnnnnnnnnnnnnnnnnnnnnnnnnnnnnnnnnnnnnnnnnnnnnnnnnnnnnnnnnnnnnnnnnnnnnnnnnnnnnnnnnnnnnnnnnnnnnnnnnnnnnnnnnnnnnnnnnnnnnnnnnnnnnnnnnnnnnnnnnnnnnnnnnnnnnnnnnnnnnnnnnnnnnnnnnnnnnnnnnnnnnnnnnnnnnnnnnnnnnnnnnnnnnnnnnnnnnnnnnnnnnnnnnnnnnnnnnnnnnnnnnnnnnnnnnnnnnnnnnnnnnnnnnnnnnnnnnnnnnnnnnnnnnnnnnnnnnnnnnnnnnnnnnnnnnnnnnnnnnnnnnnnnnnnnnnnnnnnnnnnnnnnnnnnnnnnnnnnnnnnnnnnnnnnnnnnnnnnnnnnnnnnnnnnnnnnnnnnnnnnnnnnnnnnnnnnnnnnnnnnnnnnnnnnnnnnnnnnnnnnnnnnnnnnnnnnnnnnnnnnnnnnnnnnnnnnnnnnnnnnnnnnnnnnnnnnnnnnnnnnnnnnnnnnnnnnnnnnnnnnnnnnnnnnnnnnnnnnnnnnnnnnnnnnnnnnnnnnnnnnnnnnnnnnnnnnnnnnnnnnnnnnnnnnnnnnnnnnnnnnnnnnnnnnnnnnnnnnnnnnnnnnnnnnnnnnnnnnnnnnnnnnnnnnnnnnnnnnnnnnnnnnnnnnnnnnnnnnnnnnnnnnnnnnnnnnnnnnnnnnnnnnnnnnnnnnnnnnnnnnnnnnnnnnnnnnnnnnnnnnnnnnnnnnnnnnnnnnnnnnnnnnnnnnnnnnnnnnnnnnnnnnnnnnnnnnnnnnnnnnnnnnnnnnnnnnnnnnnnnnnnnnnnnnnnnnnnnnnnnnnnnnnnnnnnnnnnnnnnnnnnnnnnnnnnnnnnnnnnnnnnnnnnnnnnnnnnnnnnnnnnnnnnnnnnnnnnnnnnnnnnnnnnnnnnnnnnnnnnnnnnnnnnnnnnnnnnnnnnnnnnnnnnnnnnnnnnnnnnnnnnnnnnnnnnnnnnnnnnnnnnnnnnnnnnnnnnnnnnnnnnnnnnnnnnnnnnnnnnnnnnnnnnnnnnnnnnnnnnnnnnnnnnnnnnnnnnnnnnnnnnnnnnnnnnnnnnnnnnnnnnnnnnnnnnnnnnnnnnnnnnnnnnnnnnnnnnnnnnnnnnnnnnnnnnnnnnnnnnnnnnnnnnnnnnnnnnnnnnnnnnnnnnnnnnnnnnnnnnnnnnnnnnnnnnnnnnnnnnnnnnnnnnnnnnnnnnnnnnnnnnnnnnnnnnnnnnnnnnnnnnnnnnnnnnnnnnnnnnnnnnnnnnnnnnnnnnnnnnnnnnnnnnnnnnnnnnnnnnnnnnnnnnnnnnnnnnnnnnnnnnnnnnnnnnnnnnnnnnnnnnnnnnnnnnnnnnnnnnnnnnnnnnnnnnnnnnnnnnnnnnnnnnnnnnnnnnnnnnnnnnnnnnnnnnnnnnnnnnnnnnnnnnnnnnnnnnnnnnnnnnnnnnnnnnnnnnnnnnnnnnnnnnnnnnnnnnnnnnnnnnnnnnnnnnnnnnnnnnnnnnnnnnnnnnnnnnnnnnnnnnnnnnnnnnnnnnnnnnnnnnnnnnnnnnnnnnnnnnnnnnnnnnnnnnnnnnnnnnnnnnnnnnnnnnnnnnnnnnnnnnnnnnnnnnnnnnnnnnnnnnnnnnnnnnnnnnnnnnnnnnnnnnnnnnnnnnnnnnnnnnnnnnnnnnnnnnnnnnnnnnnnnnnnnnnnnnnnnnnnnnnnnnnnnnnnnnnnnnnnnnnnnnnnnnnnnnnnnnnnnnnnnnnnnnnnnnnnnnnnnnnnnnnnnnnnnnnnnnnnnnnnnnnnnnnnnnnnnnnnnnnnnnnnnnnnnnnnnnnnnnnnnnnnnnnnnnnnnnnnnnnnnnnnnnnnnnnnnnnnnnnnnnnnnnnnnnnnnnnnnnnnnnnnnnnnnnnnnnnnnnnnnnnnnnnnnnnnnnnnnnnnnnnnnnnnnnnnnnnnnnnnnnnnnnnnnnnnnnnnnnnnnnnnnnnnnnnnnnnnnnnnnnnnnnnnnnnnnnnnnnnnnnnnnnnnnnnnnnnnnnnnnnnnnnnnnnnnnnnnnnnnnnnnnnnnnnnnnnnnnnnnnnnnnnnnnnnnnnnnnnnnnnnnnnnnnnnnnnnnnnnnnnnnnnnnnnnnnnnnnnnnnnnnnnnnnnnnnnnnnnnnnnnnnnnnnnnnnnnnnnnnnnnnnnnnnnnnnnnnnnnnnnnnnnnnnnnnnnnnnnnnnnnnnnnnnnnnnnnnnnnnnnnnnnnnnnnnnnnnnnnnnnnnnnnnnnnnnnnnnnnnnnnnnnnnnnnnnnnnnnnnnnnnnnnnnnnnnnnnnnnnnnnnnnnnnnnnnnnnnnnnnnnnnnnnnnnnnnnnnnnnnnnnnnnnnnnnnnnnnnnnnnnnnnnnnnnnnnnnnnnnnnnnnnnnnnnnnnnnnnnnnnnnnnnnnnnnnnnnnnnnnnnnnnnnnnnnnnnnnnnnnnnnnnnnnnnnnnnnnnnnnnnnnnnnnnnnnnnnnnnnnnnnnnnnnnnnnnnnnnnnnnnnnnnnnnnnnnnnnnnnnnnnnnnnnnnnnnnnnnnnnnnnnnnnnnnnnnnnnnnnnnnnnnnnnnnnnnnnnnnnnnnnnnnnnnnnnnnnnnnnnnnnnnnnnnnnnnnnnnnnnnnnnnnnnnnnnnnnnnnnnnnnnnnnnnnnnnnnnnnnnnnnnnnnnnnnnnnnnnnnnnnnnnnnnnnnnnnnnnnnnnnnnnnnnnnnnnnnnnnnnnnnnnnnnnnnnnnnnnnnnnnnnnnnnnnnnnnnnnnnnnnnnnnnnnnnnnnnnnnnnnnnnnnnnnnnnnnnnnnnnnnnnnnnnnnnnnnnnnnnnnnnnnnnnnnnnnnnnnnnnnnnnnnnnnnnnnnnnnnnnnnnnnnnnnnnnnnnnnnnnnnnnnnnnnnnnnnnnnnnnnnnnnnnnnnnnnnnnnnnnnnnnnnnnnnnnnnnnnnnnnnnnnnnnnnnnnnnnnnnnnnnnnnnnnnnnnnnnnnnnnnnnnnnnnnnnnnnnnnnnnnnnnnnnnnnnnnnnnnnnnnnnnnnnnnnnnnnnnnnnnnnnnnnnnnnnnnnnnnnnnnnnnnnnnnnnnnnnnnnnnnnnnnnnnnnnnnnnnnnnnnnnnnnnnnnnnnnnnnnnnnnnnnnnnnnnnnnnnnnnnnnnnnnnnnnnnnnnnnnnnnnnnnnnnnnnnnnnnnnnnnnnnnnnnnnnnnnnnnnnnnnnnnnnnnnnnnnnnnnnnnnnnnnnnnnnnnnnnnnnnnnnnnnnnnnnnnnnnnnnnnnnnnnnnnnnnnnnnnnnnnnnnnnnnnnnnnnnnnnnnnnnnnnnnnnnnnnnnnnnnnnnnnnnnnnnnnnnnnnnnnnnnnnnnnnnnnnnnnnnnnnnnnnnnnnnnnnnnnnnnnnnnnnnnnnnnnnnnnnnnnnnnnnnnnnnnnnnnnnnnnnnnnnnnnnnnnnnnnnnnnnnnnnnnnnnnnnnnnnnnnnnnnnnnnnnnnnnnnnnnnnnnnnnnnnnnnnnnnnnnnnnnnnnnnnnnnnnnnnnnnnnnnnnnnnnnnnnnnnnnnnnnnnnnnnnnnnnnnnnnnnnnnnnnnnnnnnnnnnnnnnnnnnnnnnnnnnnnnnnnnnnnnnnnnnnnnnnnnnnnnnnnnnnnnnnnnnnnnnnnnnnnnnnnnnnnnnnnnnnnnnnnnnnnnnnnnnnnnnnnnnnnnnnnnnnnnnnnnnnnnnnnnnnnnnnnnnnnnnnnnnnnnnnnnnnnnnnnnnnnnnnnnnnnnnnnnnnnnnnnnnnnnnnnnnnnnnnnnnnnnnnnnnnnnnnnnnnnnnnnnnnnnnnnnnnnnnnnnnnnnnnnnnnnnnnnnnnnnnnnnnnnnnnnnnnnnnnnnnnnnnnnnnnnnnnnnnnnnnnnnnnnnnnnnnnnnnnnnnnnnnnnnnnnnnnnnnnnnnnnnnnnnnnnnnnnnnnnnnnnnnnnnnnnnnnnnnnnnnnnnnnnnnnnnnnnnnnnnnnnnnnnnnnnnnnnnnnnnnnnnnnnnnnnnnnnnnnnnnnnnnnnnnnnnnnnnnnnnnnnnnnnnnnnnnnnnnnnnnnnnnnnnnnnnnnnnnnnnnnnnnnnnnnnnnnnnnnnnnnnnnnnnnnnnnnnnnnnnnnnnnnnnnnnnnnnnnnnnnnnnnnnnnnnnnnnnnnnnnnnnnnnnnnnnnnnnnnnnnnnnnnnnnnnnnnnnnnnnnnnnnnnnnnnnnnnnnnnnnnnnnnnnnnnnnnnnnnnnnnnnnnnnnnnnnnnnnnnnnnnnnnnnnnnnnnnnnnnnnnnnnnnnnnnnnnnnnnnnnnnnnnnnnnnnnnnnnnnnnnnnnnnnnnnnnnnnnnnnnnnnnnnnnnnnnnnnnnnnnnnnnnnnnnnnnnnnnnnnnnnnnnnnnnnnnnnnnnnnnnnnnnnnnnnnnnnnnnnnnnnnnnnnnnnnnnnnnnnnnnnnnnnnnnnnnnnnnnnnnnnnnnnnnnnnnnnnnnnnnnnnnnnnnnnnnnnnnnnnnnnnnnnnnnnnnnnnnnnnnnnnnnnnnnnnnnnnnnnnnnnnnnnnnnnnnnnnnnnnnnnnnnnnnnnnnnnnnnnnnnnnnnnnnnnnnnnnnnnnnnnnnnnnnnnnnnnnnnnnnnnnnnnnnnnnnnnnnnnnnnnnnnnnnnnnnnnnnnnnnnnnnnnnnnnnnnnnnnnnnnnnnnnnnnnnnnnnnnnnnnnnnnnnnnnnnnnnnnnnnnnnnnnnnnnnnnnnnnnnnnnnnnnnnnnnnnnnnnnnnnnnnnnnnnnnnnnnnnnnnnnnnnnnnnnnnnnnnnnnnnnnnnnnnnnnnnnnnnnnnnnnnnnnnnnnnnnnnnnnnnnnnnnnnnnnnnnnnnnnnnnnnnnnnnnnnnnnnnnnnnnnnnnnnnnnnnnnnnnnnnnnnnnnnnnnnnnnnnnnnnnnnnnnnnnnnnnnnnnnnnnnnnnnnnnnnnnnnnnnnnnnnnnnnnnnnnnnnnnnnnnnnnnnnnnnnnnnnnnnnnnnnnnnnnnnnnnnnnnnnnnnnnnnnnnnnnnnnnnnnnnnnnnnnnnnnnnnnnnnnnnnnnnnnnnnnnnnnnnnnnnnnnnnnnnnnnnnnnnnnnnnnnnnnnnnnnnnnnnnnnnnnnnnnnnnnnnnnnnnnnnnnnnnnnnnnnnnnnnnnnnnnnnnnnnnnnnnnnnnnnnnnnnnnnnnnnnnnnnnnnnnnnnnnnnnnnnnnnnnnnnnnnnnnnnnnnnnnnnnnnnnnnnnnnnnnnnnnnnnnnnnnnnnnnnnnnnnnnnnnnnnnnnnnnnnnnnnnnnnnnnnnnnnnnnnnnnnnnnnnnnnnnnnnnnnnnnnnnnnnnnnnnnnnnnnnnnnnnnnnnnnnnnnnnnnnnnnnnnnnnnnnnnnnnnnnnnnnnnnnnnnnnnnnnnnnnnnnnnnnnnnnnnnnnnnnnnnnnnnnnnnnnnnnnnnnnnnnnnnnnnnnnnnnnnnnnnnnnnnnnnnnnnnnnnnnnnnnnnnnnnnnnnnnnnnnnnnnnnnnnnnnnnnnnnnnnnnnnnnnnnnnnnnnnnnnnnnnnnnnnnnnnnnnnnnnnnnnnnnnnnnnnnnnnnnnnnnnnnnnnnnnnnnnnnnnnnnnnnnnnnnnnnnnnnnnnnnnnnnnnnnnnnnnnnnnnnnnnnnnnnnnnnnnnnnnnnnnnnnnnnnnnnnnnnnnnnnnnnnnnnnnnnnnnnnnnnnnnnnnnnnnnnnnnnnnnnnnnnnnnnnnnnnnnnnnnnnnnnnnnnnnnnnnnnnnnnnnnnnnnnnnnnnnnnnnnnnnnnnnnnnnnnnnnnnnnnnnnnnnnnnnnnnnnnnnnnnnnnnnnnnnnnnnnnnnnnnnnnnnnnnnnnnnnnnnnnnnnnnnnnnnnnnnnnnnnnnnnnnnnnnnnnnnnnnnnnnnnnnnnnnnnnnnnnnnnnnnnnnnnnnnnnnnnnnnnnnnnnnnnnnnnnnnnnnnnnnnnnnnnnnnnnnnnnnnnnnnnnnnnnnnnnnnnnnnnnnnnnnnnnnnnnnnnnnnnnnnnnnnnnnnnnnnnnnnnnnnnnnnnnnnnnnnnnnnnnnnnnnnnnnnnnnnnnnnnnnnnnnnnnnnnnnnnnnnnnnnnnnnnnnnnnnnnnnnnnnnnnnnnnnnnnnnnnnnnnnnnnnnnnnnnnnnnnnnnnnnnnnnnnnnnnnnnnnnnnnnnnnnnnnnnnnnnnnnnnnnnnnnnnnnnnnnnnnnnnnnnnnnnnnnnnnnnnnnnnnnnnnnnnnnnnnnnnnnnnnnnnnnnnnnnnnnnnnnnnnnnnnnnnnnnnnnnnnnnnnnnnnnnnnnnnnnnnnnnnnnnnnnnnnnnnnnnnnnnnnnnnnnnnnnnnnnnnnnnnnnnnnnnnnnnnnnnnnnnnnnnnnnnnnnnnnnnnnnnnnnnnnnnnnnnnnnnnnnnnnnnnnnnnnnnnnnnnnnnnnnnnnnnnnnnnnnnnnnnnnnnnnnnnnnnnnnnnnnnnnnnnnnnnnnnnnnnnnnnnnnnnnnnnnnnnnnnnnnnnnnnnnnnnnnnnnnnnnnnnnnnnnnnnnnnnnnnnnnnnnnnnnnnnnnnnnnnnnnnnnnnnnnnnnnnnnnnnnnnnnnnnnnnnnnnnnnnnnnnnnnnnnnnnnnnnnnnnnnnnnnnnnnnnnnnnnnnnnnnnnnnnnnnnnnnnnnnnnnnnnnnnnnnnnnnnnnnnnnnnnnnnnnnnnnnnnnnnnnnnnnnnnnnnnnnnnnnnnnnnnnnnnnnnnnnnnnnnnnnnnnnnnnnnnnnnnnnnnnnnnnnnnnnnnnnnnnnnnnnnnnnnnnnnnnnnnnnnnnnnnnnnnnnnnnnnnnnnnnnnnnnnnnnnnnnnnnnnnnnnnnnnnnnnnnnnnnnnnnnnnnnnnnnnnnnnnnnnnnnnnnnnnnnnnnnnnnnnnnnnnnnnnnnnnnnnnnnnnnnnnnnnnnnnnnnnnnnnnnnnnnnnnnnnnnnnnnnnnnnnnnnnnnnnnnnnnnnnnnnnnnnnnnnnnnnnnnnnnnnnnnnnnnnnnnnnnnnnnnnnnnnnnnnnnnnnnnnnnnnnnnnnnnnnnnnnnnnnnnnnnnnnnnnnnnnnnnnnnnnnnnnnnnnnnnnnnnnnnnnnnnnnnnnnnnnnnnnnnnnnnnnnnnnnnnnnnnnnnnnnnnnnnnnnnnnnnnnnnnnnnnnnnnnnnnnnnnnnnnnnnnnnnnnnnnnnnnnnnnnnnnnnnnnnnnnnnnnnnnnnnnnnnnnnnnnnnnnnnnnnnnnnnnnnnnnnnnnnnnnnnnnnnnnnnnnnnnnnnnnnnnnnnnnnnnnnnnnnnnnnnnnnnnnnnnnnnnnnnnnnnnnnnnnnnnnnnnnnnnnnnnnnnnnnnnnnnnnnnnnnnnnnnnnnnnnnnnnnnnnnnnnnnnnnnnnnnnnnnnnnnnnnnnnnnnnnnnnnnnnnnnnnnnnnnnnnnnnnnnnnnnnnnnnnnnnnnnnnnnnnnnnnnnnnnnnnnnnnnnnnnnnnnnnnnnnnnnnnnnnnnnnnnnnnnnnnnnnnnnnnnnnnnnnnnnnnnnnnnnnnnnnnnnnnnnnnnnnnnnnnnnnnnnnnnnnnnnnnnnnnnnnnnnnnnnnnnnnnnnnnnnnnnnnnnnnnnnnnnnnnnnnnnnnnnnnnnnnnnnnnnnnnnnnnnnnnnnnnnnnnnnnnnnnnnnnnnnnnnnnnnnnnnnnnnnnnnnnnnnnnnnnnnnnnnnnnnnnnnnnnnnnnnnnnnnnnnnnnnnnnnnnnnnnnnnnnnnnnnnnnnnnnnnnnnnnnnnnnnnnnnnnnnnnnnnnnnnnnnnnnnnnnnnnnnnnnnnnnnnnnnnnnnnnnnnnnnnnnnnnnnnnnnnnnnnnnnnnnnnnnnnnnnnnnnnnnnnnnnnnnnnnnnnnnnnnnnnnnnnnnnnnnnnnnnnnnnnnnnnnnnnnnnnnnnnnnnnnnnnnnnnnnnnnnnnnnnnnnnnnnnnnnnnnnnnnnnnnnnnnnnnnnnnnnnnnnnnnnnnnnnnnnnnnnnnnnnnnnnnnnnnnnnnnnnnnnnnnnnnnnnnnnnnnnnnnnnnnnnnnnnnnnnnnnnnnnnnnnnnnnnnnnnnnnnnnnnnnnnnnnnnnnnnnnnnnnnnnnnnnnnnnnnnnnnnnnnnnnnnnnnnnnnnnnnnnnnnnnnnnnnnnnnnnnnnnnnnnnnnnnnnnnnnnnnnnnnnnnnnnnnnnnnnnnnnnnnnnnnnnnnnnnnnnnnnnnnnnnnnnnnnnnnnnnnnnnnnnnnnnnnnnnnnnnnnnnnnnnnnnnnnnnnnnnnnnnnnnnnnnnnnnnnnnnnnnnnnnnnnnnnnnnnnnnnnnnnnnnnnnnnnnnnnnnnnnnnnnnnnnnnnnnnnnnnnnnnnnnnnnnnnnnnnnnnnnnnnnnnnnnnnnnnnnnnnnnnnnnnnnnnnnnnnnnnnnnnnnnnnnnnnnnnnnnnnnnnnnnnnnnnnnnnnnnnnnnnnnnnnnnnnnnnnnnnnnnnnnnnnnnnnnnnnnnnnnnnnnnnnnnnnnnnnnnnnnnnnnnnnnnnnnnnnnnnnnnnnnnnnnnnnnnnnnnnnnnnnnnnnnnnnnnnnnnnnnnnnnnnnnnnnnnnnnnnnnnnnnnnnnnnnnnnnnnnnnnnnnnnnnnnnnnnnnnnnnnnnnnnnnnnnnnnnnnnnnnnnnnnnnnnnnnnnnnnnnnnnnnnnnnnnnnnnnnnnnnnnnnnnnnnnnnnnnnnnnnnnnnnnnnnnnnnnnnnnnnnnnnnnnnnnnnnnnnnnnnnnnnnnnnnnnnnnnnnnnnnnnnnnnnnnnnnnnnnnnnnnnnnnnnnnnnnnnnnnnnnnnnnnnnnnnnnnnnnnnnnnnnnnnnnnnnnnnnnnnnnnnnnnnnnnnnnnnnnnnnnnnnnnnnnnnnnnnnnnnnnnnnnnnnnnnnnnnnnnnnnnnnnnnnnnnnnnnnnnnnnnnnnnnnnnnnnnnnnnnnnnnnnnnnnnnnnnnnnnnnnnnnnnnnnnnnnnnnnnnnnnnnnnnnnnnnnnnnnnnnnnnnnnnnnnnnnnnnnnnnnnnnnnnnnnnnnnnnnnnnnnnnnnnnnnnnnnnnnnnnnnnnnnnnnnnnnnnnnnnnnnnnnnnnnnnnnnnnnnnnnnnnnnnnnnnnnnnnnnnnnnnnnnnnnnnnnnnnnnnnnnnnnnnnnnnnnnnnnnnnnnnnnnnnnnnnnnnnnnnnnnnnnnnnnnnnnnnnnnnnnnnnnnnnnnnnnnnnnnnnnnnnnnnnnnnnnnnnnnnnnnnnnnnnnnnnnnnnnnnnnnnnnnnnnnnnnnnnnnnnnnnnnnnnnnnnnnnnnnnnnnnnnnnnnnnnnnnnnnnnnnnnnnnnnnnnnnnnnnnnnnnnnnnnnnnnnnnnnnnnnnnnnnnnnnnnnnnnnnnnnnnnnnnnnnnnnnnnnnnnnnnnnnnnnnnnnnnnnnnnnnnnnnnnnnnnnnnnnnnnnnnnnnnnnnnnnnnnnnnnnnnnnnnnnnnnnnnnnnnnnnnnnnnnnnnnnnnnnnnnnnnnnnnnnnnnnnnnnnnnnnnnnnnnnnnnnnnnnnnnnnnnnnnnnnnnnnnnnnnnnnnnnnnnnnnnnnnnnnnnnnnnnnnnnnnnnnnnnnnnnnnnnnnnnnnnnnnnnnnnnnnnnnnnnnnnnnnnnnnnnnnnnnnnnnnnnnnnnnnnnnnnnnnnnnnnnnnnnnnnnnnnnnnnnnnnnnnnnnnnnnnnnnnnnnnnnnnnnnnnnnnnnnnnnnnnnnnnnnnnnnnnnnnnnnnnnnnnnnnnnnnnnnnnnnnnnnnnnnnnnnnnnnnnnnnnnnnnnnnnnnnnnnnnnnnnnnnnnnnnnnnnnnnnnnnnnnnnnnnnnnnnnnnnnnnnnnnnnnnnnnnnnnnnnnnnnnnnnnnnnnnnnnnnnnnnnnnnnnnnnnnnnnnnnnnnnnnnnnnnnnnnnnnnnnnnnnnnnnnnnnnnnnnnnnnnnnnnnnnnnnnnnnnnnnnnnnnnnnnnnnnnnnnnnnnnnnnnnnnnnnnnnnnnnnnnnnnnnnnnnnnnnnnnnnnnnnnnnnnnnnnnnnnnnnnnnnnnnnnnnnnnnnnnnnnnnnnnnnnnnnnnnnnnnnnnnnnnnnnnnnnnnnnnnnnnnnnnnnnnnnnnnnnnnnnnnnnnnnnnnnnnnnnnnnnnnnnnnnnnnnnnnnnnnnnnnnnnnnnnnnnnnnnnnnnnnnnnnnnnnnnnnnnnnnnnnnnnnnnnnnnnnnnnnnnnnnnnnnnnnnnnnnnnnnnnnnnnnnnnnnnnnnnnnnnnnnnnnnnnnnnnnnnnnnnnnnnnnnnnnnnnnnnnnnnnnnnnnnnnnnnnnnnnnnnnnnnnnnnnnnnnnnnnnnnnnnnnnnnnnnnnnnnnnnnnnnnnnnnnnnnnnnnnnnnnnnnnnnnnnnnnnnnnnnnnnnnnnnnnnnnnnnnnnnnnnnnnnnnnnnnnnnnnnnnnnnnnnnnnnnnnnnnnnnnnnnnnnnnnnnnnnnnnnnnnnnnnnnnnnnnnnnnnnnnnnnnnnnnnnnnnnnnnnnnnnnnnnnnnnnnnnnnnnnnnnnnnnnnnnnnnnnnnnnnnnnnnnnnnnnnnnnnnnnnnnnnnnnnnnnnnnnnnnnnnnnnnnnnnnnnnnnnnnnnnnnnnnnnnnnnnnnnnnnnnnnnnnnnnnnnnnnnnnnnnnnnnnnnnnnnnnnnnnnnnnnnnnnnnnnnnnnnnnnnnnnnnnnnnnnnnnnnnnnnnnnnnnnnnnnnnnnnnnnnnnnnnnnnnnnnnnnnnnnnnnnnnnnnnnnnnnnnnnnnnnnnnnnnnnnnnnnnnnnnnnnnnnnnnnnnnnnnnnnnnnnnnnnnnnnnnnnnnnnnnnnnnnnnnnnnnnnnnnnnnnnnnnnnnnnnnnnnnnnnnnnnnnnnnnnnnnnnnnnnnnnnnnnnnnnnnnnnnnnnnnnnnnnnnnnnnnnnnnnnnnnnnnnnnnnnnnnnnnnnnnnnnnnnnnnnnnnnnnnnnnnnnnnnnnnnnnnnnnnnnnnnnnnnnnnnnnnnnnnnnnnnnnnnnnnnnnnnnnnnnnnnnnnnnnnnnnnnnnnnnnnnnnnnnnnnnnnnnnnnnnnnnnnnnnnnnnnnnnnnnnnnnnnnnnnnnnnnnnnnnnnnnnnnnnnnnnnnnnnnnnnnnnnnnnnnnnnnnnnnnnnnnnnnnnnnnnnnnnnnnnnnnnnnnnnnnnnnnnnnnnnnnnnnnnnnnnnnnnnnnnnnnnnnnnnnnnnnnnnnnnnnnnnnnnnnnnnnnnnnnnnnnnnnnnnnnnnnnnnnnnnnnnnnnnnnnnnnnnnnnnnnnnnnnnnnnnnnnnnnnnnnnnnnnnnnnnnnnnnnnnnnnnnnnnnnnnnnnnnnnnnnnnnnnnnnnnnnnnnnnnnnnnnnnnnnnnnnnnnnnnnnnnnnnnnnnnnnnnnnnnnnnnnnnnnnnnnnnnnnnnnnnnnnnnnnnnnnnnnnnnnnnnnnnnnnnnnnnnnnnnnnnnnnnnnnnnnnnnnnnnnnnnnnnnnnnnnnnnnnnnnnnnnnnnnnnnnnnnnnnnnnnnnnnnnnnnnnnnnnnnnnnnnnnnnnnnnnnnnnnnnnnnnnnnnnnnnnnnnnnnnnnnnnnnnnnnnnnnnnnnnnnnnnnnnnnnnnnnnnnnnnnnnnnnnnnnnnnnnnnnnnnnnnnnnnnnnnnnnnnnnnnnnnnnnnnnnnnnnnnnnnnnnnnnnnnnnnnnnnnnnnnnnnnnnnnnnnnnnnnnnnnnnnnnnnnnnnnnnnnnnnnnnnnnnnnnnnnnnnnnnnnnnnnnnnnnnnnnnnnnnnnnnnnnnnnnnnnnnnnnnnnnnnnnnnnnnnnnnnnnnnnnnnnnnnnnnnnnnnnnnnnnnnnnnnnnnnnnnnnnnnnnnnnnnnnnnnnnnnnnnnnnnnnnnnnnnnnnnnnnnnnnnnnnnnnnnnnnnnnnnnnnnnnnnnnnnnnnnnnnnnnnnnnnnnnnnnnnnnnnnnnnnnnnnnnnnnnnnnnnnnnnnnnnnnnnnnnnnnnnnnnnnnnnnnnnnnnnnnnnnnnnnnnnnnnnnnnnnnnnnnnnnnnnnnnnnnnnnnnnnnnnnnnnnnnnnnnnnnnnnnnnnnnnnnnnnnnnnnnnnnnnnnnnnnnnnnnnnnnnnnnnnnnnnnnnnnnnnnnnnnnnnnnnnnnnnnnnnnnnnnnnnnnnnnnnnnnnnnnnnnnnnnnnnnnnnnnnnnnnnnnnnnnnnnnnnnnnnnnnnnnnnnnnnnnnnnnnnnnnnnnnnnnnnnnnnnnnnnnnnnnnnnnnnnnnnnnnnnnnnnnnnnnnnnnnnnnnnnnnnnnnnnnnnnnnnnnnnnnnnnnnnnnnnnnnnnnnnnnnnnnnnnnnnnnnnnnnnnnnnnnnnnnnnnnnnnnnnnnnnnnnnnnnnnnnnnnnnnnnnnnnnnnnnnnnnnnnnnnnnnnnnnnnnnnnnnnnnnnnnnnnnnnnnnnnnnnnnnnnnnnnnnnnnnnnnnnnnnnnnnnnnnnnnnnnnnnnnnnnnnnnnnnnnnnnnnnnnnnnnnnnnnnnnnnnnnnnnnnnnnnnnnnnnnnnnnnnnnnnnnnnnnnnnnnnnnnnnnnnnnnnnnnnnnnnnnnnnnnnnnnnnnnnnnnnnnnnnnnnnnnnnnnnnnnnnnnnnnnnnnnnnnnnnnnnnnnnnnnnnnnnnnnnnnnnnnnnnnnnnnnnnnnnnnnnnnnnnnnnnnnnnnnnnnnnnnnnnnnnnnnnnnnnnnnnnnnnnnnnnnnnnnnnnnnnnnnnnnnnnnnnnnnnnnnnnnnnnnnnnnnnnnnnnnnnnnnnnnnnnnnnnnnnnnnnnnnnnnnnnnnnnnnnnnnnnnnnnnnnnnnnnnnnnnnnnnnnnnnnnnnnnnnnnnnnnnnnnnnnnnnnnnnnnnnnnnnnnnnnnnnnnnnnnnnnnnnnnnnnnnnnnnnnnnnnnnnnnnnnnnnnnnnnnnnnnnnnnnnnnnnnnnnnnnnnnnnnnnnnnnnnnnnnnnnnnnnnnnnnnnnnnnnnnnnnnnnnnnnnnnnnnnnnnnnnnnnnnnnnnnnnnnnnnnnnnnnnnnnnnnnnnnnnnnnnnnnnnnnnnnnnnnnnnnnnnnnnnnnnnnnnnnnnnnnnnnnnnnnnnnnnnnnnnnnnnnnnnnnnnnnnnnnnnnnnnnnnnnnnnnnnnnnnnnnnnnnnnnnnnnnnnnnnnnnnnnnnnnnnnnnnnnnnnnnnnnnnnnnnnnnnnnnnnnnnnnnnnnnnnnnnnnnnnnnnnnnnnnnnnnnnnnnnnnnnnnnnnnnnnnnnnnnnnnnnnnnnnnnnnnnnnnnnnnnnnnnnnnnnnnnnnnnnnnnnnnnnnnnnnnnnnnnnnnnnnnnnnnnnnnnnnnnnnnnnnnnnnnnnnnnnnnnnnnnnnnnnnnnnnnnnnnnnnnnnnnnnnnnnnnnnnnnnnnnnnnnnnnnnnnnnnnnnnnnnnnnnnnnnnnnnnnnnnnnnnnnnnnnnnnnnnnnnnnnnnnnnnnnnnnnnnnnnnnnnnnnnnnnnnnnnnnnnnnnnnnnnnnnnnnnnnnnnnnnnnnnnnnnnnnnnnnnnnnnnnnnnnnnnnnnnnnnnnnnnnnnnnnnnnnnnnnnnnnnnnnnnnnnnnnnnnnnnnnnnnnnnnnnnnnnnnnnnnnnnnnnnnnnnnnnnnnnnnnnnnnnnnnnnnnnnnnnnnnnnnnnnnnnnnnnnnnnnnnnnnnnnnnnnnnnnnnnnnnnnnnnnnnnnnnnnnnnnnnnnnnnnnnnnnnnnnnnnnnnnnnnnnnnnnnnnnnnnnnnnnnnnnnnnnnnnnnnnnnnnnnnnnnnnnnnnnnnnnnnnnnnnnnnnnnnnnnnnnnnnnnnnnnnnnnnnnnnnnnnnnnnnnnnnnnnnnnnnnnnnnnnnnnnnnnnnnnnnnnnnnnnnnnnnnnnnnnnnnnnnnnnnnnnnnnnnnnnnnnnnnnnnnnnnnnnnnnnnnnnnnnnnnnnnnnnnnnnnnnnnnnnnnnnnnnnnnnnnnnnnnnnnnnnnnnnnnnnnnnnnnnnnnnnnnnnnnnnnnnnnnnnnnnnnnnnnnnnnnnnnnnnnnnnnnnnnnnnnnnnnnnnnnnnnnnnnnnnnnnnnnnnnnnnnnnnnnnnnnnnnnnnnnnnnnnnnnnnnnnnnnnnnnnnnnnnnnnnnnnnnnnnnnnnnnnnnnnnnnnnnnnnnnnnnnnnnnnnnnnnnnnnnnnnnnnnnnnnnnnnnnnnnnnnnnnnnnnnnnnnnnnnnnnnnnnnnnnnnnnnnnnnnnnnnnnnnnnnnnnnnnnnnnnnnnnnnnnnnnnnnnnnnnnnnnnnnnnnnnnnnnnnnnnnnnnnnnnnnnnnnnnnnnnnnnnnnnnnnnnnnnnnnnnnnnnnnnnnnnnnnnnnnnnnnnnnnnnnnnnnnnnnnnnnnnnnnnnnnnnnnnnnnnnnnnnnnnnnnnnnnnnnnnnnnnnnnnnnnnnnnnnnnnnnnnnnnnnnnnnnnnnnnnnnnnnnnnnnnnnnnnnnnnnnnnnnnnnnnnnnnnnnnnnnnnnnnnnnnnnnnnnnnnnnnnnnnnnnnnnnnnnnnnnnnnnnnnnnnnnnnnnnnnnnnnnnnnnnnnnnnnnnnnnnnnnnnnnnnnnnnnnnnnnnnnnnnnnnnnnnnnnnnnnnnnnnnnnnnnnnnnnnnnnnnnnnnnnnnnnnnnnnnnnnnnnnnnnnnnnnnnnnnnnnnnnnnnnnnnnnnnnnnnnnnnnnnnnnnnnnnnnnnnnnnnnnnnnnnnnnnnnnnnnnnnnnnnnnnnnnnnnnnnnnnnnnnnnnnnnnnnnnnnnnnnnnnnnnnnnnnnnnnnnnnnnnnnnnnnnnnnnnnnnnnnnnnnnnnnnnnnnnnnnnnnnnnnnnnnnnnnnnnnnnnnnnnnnnnnnnnnnnnnnnnnnnnnnnnnnnnnnnnnnnnnnnnnnnnnnnnnnnnnnnnnnnnnnnnnnnnnnnnnnnnnnnnnnnnnnnnnnnnnnnnnnnnnnnnnnnnnnnnnnnnnnnnnnnnnnnnnnnnnnnnnnnnnnnnnnnnnnnnnnnnnnnnnnnnnnnnnnnnnnnnnnnnnnnnnnnnnnnnnnnnnnnnnnnnnnnnnnnnnnnnnnnnnnnnnnnnnnnnnnnnnnnnnnnnnnnnnnnnnnnnnnnnnnnnnnnnnnnnnnnnnnnnnnnnnnnnnnnnnnnnnnnnnnnnnnnnnnnnnnnnnnnnnnnnnnnnnnnnnnnnnnnnnnnnnnnnnnnnnnnnnnnnnnnnnnnnnnnnnnnnnnnnnnnnnnnnnnnnnnnnnnnnnnnnnnnnnnnnnnnnnnnnnnnnnnnnnnnnnnnnnnnnnnnnnnnnnnnnnnnnnnnnnnnnnnnnnnnnnnnnnnnnnnnnnnnnnnnnnnnnnnnnnnnnnnnnnnnnnnnnnnnnnnnnnnnnnnnnnnnnnnnnnnnnnnnnnnnnnnnnnnnnnnnnnnnnnnnnnnnnnnnnnnnnnnnnnnnnnnnnnnnnnnnnnnnnnnnnnnnnnnnnnnnnnnnnnnnnnnnnnnnnnnnnnnnnnnnnnnnnnnnnnnnnnnnnnnnnnnnnnnnnnnnnnnnnnnnnnnnnnnnnnnnnnnnnnnnnnnnnnnnnnnnnnnnnnnnnnnnnnnnnnnnnnnnnnnnnnnnnnnnnnnnnnnnnnnnnnnnnnnnnnnnnnnnnnnnnnnnnnnnnnnnnnnnnnnnnnnnnnnnnnnnnnnnnnnnnnnnnnnnnnnnnnnnnnnnnnnnnnnnnnnnnnnnnnnnnnnnnnnnnnnnnnnnnnnnnnnnnnnnnnnnnnnnnnnnnnnnnnnnnnnnnnnnnnnnnnnnnnnnnnnnnnnnnnnnnnnnnnnnnnnnnnnnnnnnnnnnnnnnnnnnnnnnnnnnnnnnnnnnnnnnnnnnnnnnnnnnnnnnnnnnnnnnnnnnnnnnnnnnnnnnnnnnnnnnnnnnnnnnnnnnnnnnnnnnnnnnnnnnnnnnnnnnnnnnnnnnnnnnnnnnnnnnnnnnnnnnnnnnnnnnnnnnnnnnnnnnnnnnnnnnnnnnnnnnnnnnnnnnnnnnnnnnnnnnnnnnnnnnnnnnnnnnnnnnnnnnnnnnnnnnnnnnnnnnnnnnnnnnnnnnnnnnnnnnnnnnnnnnnnnnnnnnnnnnnnnnnnnnnnnnnnnnnnnnnnnnnnnnnnnnnnnnnnnnnnnnnnnnnnnnnnnnnnnnnnnnnnnnnnnnnnnnnnnnnnnnnnnnnnnnnnnnnnnnnnnnnnnnnnnnnnnnnnnnnnnnnnnnnnnnnnnnnnnnnnnnnnnnnnnnnnnnnnnnnnnnnnnnnnnnnnnnnnnnnnnnnnnnnnnnnnnnnnnnnnnnnnnnnnnnnnnnnnnnnnnnnnnnnnnnnnnnnnnnnnnnnnnnnnnnnnnnnnnnnnnnnnnnnnnnnnnnnnnnnnnnnnnnnnnnnnnnnnnnnnnnnnnnnnnnnnnnnnnnnnnnnnnnnnnnnnnnnnnnnnnnnnnnnnnnnnnnnnnnnnnnnnnnnnnnnnnnnnnnnnnnnnnnnnnnnnnnnnnnnnnnnnnnnnnnnnnnnnnnnnnnnnnnnnnnnnnnnnnnnnnnnnnnnnnnnnnnnnnnnnnnnnnnnnnnnnnnnnnnnnnnnnnnnnnnnnnnnnnnnnnnnnnnnnnnnnnnnnnnnnnnnnnnnnnnnnnnnnnnnnnnnnnnnnnnnnnnnnnnnnnnnnnnnnnnnnnnnnnnnnnnnnnnnnnnnnnnnnnnnnnnnnnnnnnnnnnnnnnnnnnnnnnnnnnnnnnnnnnnnnnnnnnnnnnnnnnnnnnnnnnnnnnnnnnnnnnnnnnnnnnnnnnnnnnnnnnnnnnnnnnnnnnnnnnnnnnnnnnnnnnnnnnnnnnnnnnnnnnnnnnnnnnnnnnnnnnnnnnnnnnnnnnnnnnnnnnnnnnnnnnnnnnnnnnnnnnnnnnnnnnnnnnnnnnnnnnnnnnnnnnnnnnnnnnnnnnnnnnnnnnnnnnnnnnnnnnnnnnnnnnnnnnnnnnnnnnnnnnnnnnnnnnnnnnnnnnnnnnnnnnnnnnnnnnnnnnnnnnnnnnnnnnnnnnnnnnnnnnnnnnnnnnnnnnnnnnnnnnnnnnnnnnnnnnnnnnnnnnnnnnnnnnnnnnnnnnnnnnnnnnnnnnnnnnnnnnnnnnnnnnnnnnnnnnnnnnnnnnnnnnnnnnnnnnnnnnnnnnnnnnnnnnnnnnnnnnnnnnnnnnnnnnnnnnnnnnnnnnnnnnnnnnnnnnnnnnnnnnnnnnnnnnnnnnnnnnnnnnnnnnnnnnnnnnnnnnnnnnnnnnnnnnnnnnnnnnnnnnnnnnnnnnnnnnnnnnnnnnnnnnnnnnnnnnnnnnnnnnnnnnnnnnnnnnnnnnnnnnnnnnnnnnnnnnnnnnnnnnnnnnnnnnnnnnnnnnnnnnnnnnnnnnnnnnnnnnnnnnnnnnnnnnnnnnnnnnnnnnnnnnnnnnnnnnnnnnnnnnnnnnnnnnnnnnnnnnnnnnnnnnnnnnnnnnnnnnnnnnnnnnnnnnnnnnnnnnnnnnnnnnnnnnnnnnnnnnnnnnnnnnnnnnnnnnnnnnnnnnnnnnnnnnnnnnnnnnnnnnnnnnnnnnnnnnnnnnnnnnnnnnnnnnnnnnnnnnnnnnnnnnnnnnnnnnnnnnnnnnnnnnnnnnnnnnnnnnnnnnnnnnnnnnnnnnnnnnnnnnnnnnnnnnnnnnnnnnnnnnnnnnnnnnnnnnnnnnnnnnnnnnnnnnnnnnnnnnnnnnnnnnnnnnnnnnnnnnnnnnnnnnnnnnnnnnnnnnnnnnnnnnnnnnnnnnnnnnnnnnnnnnnnnnnnnnnnnnnnnnnnnnnnnnnnnnnnnnnnnnnnnnnnnnnnnnnnnnnnnnnnnnnnnnnnnnnnnnnnnnnnnnnnnnnnnnnnnnnnnnnnnnnnnnnnnnnnnnnnnnnnnnnnnnnnnnnnnnnnnnnnnnnnnnnnnnnnnnnnnnnnnnnnnnnnnnnnnnnnnnnnnnnnnnnnnnnnnnnnnnnnnnnnnnnnnnnnnnnnnnnnnnnnnnnnnnnnnnnnnnnnnnnnnnnnnnnnnnnnnnnnnnnnnnnnnnnnnnnnnnnnnnnnnnnnnnnnnnnnnnnnnnnnnnnnnnnnnnnnnnnnnnnnnnnnnnnnnnnnnnnnnnnnnnnnnnnnnnnnnnnnnnnnnnnnnnnnnnnnnnnnnnnnnnnnnnnnnnnnnnnnnnnnnnnnnnnnnnnnnnnnnnnnnnnnnnnnnnnnnnnnnnnnnnnnnnnnnnnnnnnnnnnnnnnnnnnnnnnnnnnnnnnnnnnnnnnnnnnnnnnnnnnnnnnnnnnnnnnnnnnnnnnnnnnnnnnnnnnnnnnnnnnnnnnnnnnnnnnnnnnnnnnnnnnnnnnnnnnnnnnnnnnnnnnnnnnnnnnnnnnnnnnnnnnnnnnnnnnnnnnnnnnnnnnnnnnnnnnnnnnnnnnnnnnnnnnnnnnnnnnnnnnnnnnnnnnnnnnnnnnnnnnnnnnnnnnnnnnnnnnnnnnnnnnnnnnnnnnnnnnnnnnnnnnnnnnnnnnnnnnnnnnnnnnnnnnnnnnnnnnnnnnnnnnnnnnnnnnnnnnnnnnnnnnnnnnnnnnnnnnnnnnnnnnnnnnnnnnnnnnnnnnnnnnnnnnnnnnnnnnnnnnnnnnnnnnnnnnnnnnnnnnnnnnnnnnnnnnnnnnnnnnnnnnnnnnnnnnnnnnnnnnnnnnnnnnnnnnnnnnnnnnnnnnnnnnnnnnnnnnnnnnnnnnnnnnnnnnnnnnnnnnnnnnnnnnnnnnnnnnnnnnnnnnnnnnnnnnnnnnnnnnnnnnnnnnnnnnnnnnnnnnnnnnnnnnnnnnnnnnnnnnnnnnnnnnnnnnnnnnnnnnnnnnnnnnnnnnnnnnnnnnnnnnnnnnnnnnnnnnnnnnnnnnnnnnnnnnnnnnnnnnnnnnnnnnnnnnnnnnnnnnnnnnnnnnnnnnnnnnnnnnnnnnnnnnnnnnnnnnnnnnnnnnnnnnnnnnnnnnnnnnnnnnnnnnnnnnnnnnnnnnnnnnnnnnnnnnnnnnnnnnnnnnnnnnnnnnnnnnnnnnnnnnnnnnnnnnnnnnnnnnnnnnnnnnnnnnnnnnnnnnnnnnnnnnnnnnnnnnnnnnnnnnnnnnnnnnnnnnnnnnnnnnnnnnnnnnnnnnnnnnnnnnnnnnnnnnnnnnnnnnnnnnnnnnnnnnnnnnnnnnnnnnnnnnnnnnnnnnnnnnnnnnnnnnnnnnnnnnnnnnnnnnnnnnnnnnnnnnnnnnnnnnnnnnnnnnnnnnnnnnnnnnnnnnnnnnnnnnnnnnnnnnnnnnnnnnnnnnnnnnnnnnnnnnnnnnnnnnnnnnnnnnnnnnnnnnnnnnnnnnnnnnnnnnnnnnnnnnnnnnnnnnnnnnnnnnnnnnnnnnnnnnnnnnnnnnnnnnnnnnnnnnnnnnnnnnnnnnnnnnnnnnnnnnnnnnnnnnnnnnnnnnnnnnnnnnnnnnnnnnnnnnnnnnnnnnnnnnnnnnnnnnnnnnnnnnnnnnnnnnnnnnnnnnnnnnnnnnnnnnnnnnnnnnnnnnnnnnnnnnnnnnnnnnnnnnnnnnnnnnnnnnnnnnnnnnnnnnnnnnnnnnnnnnnnnnnnnnnnnnnnnnnnnnnnnnnnnnnnnnnnnnnnnnnnnnnnnnnnnnnnnnnnnnnnnnnnnnnnnnnnnnnnnnnnnnnnnnnnnnnnnnnnnnnnnnnnnnnnnnnnnnnnnnnnnnnnnnnnnnnnnnnnnnnnnnnnnnnnnnnnnnnnnnnnnnnnnnnnnnnnnnnnnnnnnnnnnnnnnnnnnnnnnnnnnnnnnnnnnnnnnnnnnnnnnnnnnnnnnnnnnnnnnnnnnnnnnnnnnnnnnnnnnnnnnnnnnnnnnnnnnnnnnnnnnnnnnnnnnnnnnnnnnnnnnnnnnnnnnnnnnnnnnnnnnnnnnnnnnnnnnnnnnnnnnnnnnnnnnnnnnnnnnnnnnnnnnnnnnnnnnnnnnnnnnnnnnnnnnnnnnnnnnnnnnnnnnnnnnnnnnnnnnnnnnnnnnnnnnnnnnnnnnnnnnnnnnnnnnnnnnnnnnnnnnnnnnnnnnnnnnnnnnnnnnnnnnnnnnnnnnnnnnnnnnnnnnnnnnnnnnnnnnnnnnnnnnnnnnnnnnnnnnnnnnnnnnnnnnnnnnnnnnnnnnnnnnnnnnnnnnnnnnnnnnnnnnnnnnnnnnnnnnnnnnnnnnnnnnnnnnnnnnnnnnnnnnnnnnnnnnnnnnnnnnnnnnnnnnnnnnnnnnnnnnnnnnnnnnnnnnnnnnnnnnnnnnnnnnnnnnnnnnnnnnnnnnnnnnnnnnnnnnnnnnnnnnnnnnnnnnnnnnnnnnnnnnnnnnnnnnnnnnnnnnnnnnnnnnnnnnnnnnnnnnnnnnnnnnnnnnnnnnnnnnnnnnnnnnnnnnnnnnnnnnnnnnnnnnnnnnnnnnnnnnnnnnnnnnnnnnnnnnnnnnnnnnnnnnnnnnnnnnnnnnnnnnnnnnnnnnnnnnnnnnnnnnnnnnnnnnnnnnnnnnnnnnnnnnnnnnnnnnnnnnnnnnnnnnnnnnnnnnnnnnnnnnnnnnnnnnnnnnnnnnnnnnnnnnnnnnnnnnnnnnnnnnnnnnnnnnnnnnnnnnnnnnnnnnnnnnnnnnnnnnnnnnnnnnnnnnnnnnnnnnnnnnnnnnnnnnnnnnnnnnnnnnnnnnnnnnnnnnnnnnnnnnnnnnnnnnnnnnnnnnnnnnnnnnnnnnnnnnnnnnnnnnnnnnnnnnnnnnnnnnnnnnnnnnnnnnnnnnnnnnnnnnnnnnnnnnnnnnnnnnnnnnnnnnnnnnnnnnnnnnnnnnnnnnnnnnnnnnnnnnnnnnnnnnnnnnnnnnnnnnnnnnnnnnnnnnnnnnnnnnnnnnnnnnnnnnnnnnnnnnnnnnnnnnnnnnnnnnnnnnnnnnnnnnnnnnnnnnnnnnnnnnnnnnnnnnnnnnnnnnnnnnnnnnnnnnnnnnnnnnnnnnnnnnnnnnnnnnnnnnnnnnnnnnnnnnnnnnnnnnnnnnnnnnnnnnnnnnnnnnnnnnnnnnnnnnnnnnnnnnnnnnnnnnnnnnnnnnnnnnnnnnnnnnnnnnnnnnnnnnnnnnnnnnnnnnnnnnnnnnnnnnnnnnnnnnnnnnnnnnnnnnnnnnnnnnnnnnnnnnnnnnnnnnnnnnnnnnnnnnnnnnnnnnnnnnnnnnnnnnnnnnnnnnnnnnnnnnnnnnnnnnnnnnnnnnnnnnnnnnnnnnnnnnnnnnnnnnnnnnnnnnnnnnnnnnnnnnnnnnnnnnnnnnnnnnnnnnnnnnnnnnnnnnnnnnnnnnnnnnnnnnnnnnnnnnnnnnnnnnnnnnnnnnnnnnnnnnnnnnnnnnnnnnnnnnnnnnnnnnnnnnnnnnnnnnnnnnnnnnnnnnnnnnnnnnnnnnnnnnnnnnnnnnnnnnnnnnnnnnnnnnnnnnnnnnnnnnnnnnnnnnnnnnnnnnnnnnnnnnnnnnnnnnnnnnnnnnnnnnnnnnnnnnnnnnnnnnnnnnnnnnnnnnnnnnnnnnnnnnnnnnnnnnnnnnnnnnnnnnnnnnnnnnnnnnnnnnnnnnnnnnnnnnnnnnnnnnnnnnnnnnnnnnnnnnnnnnnnnnnnnnnnnnnnnnnnnnnnnnnnnnnnnnnnnnnnnnnnnnnnnnnnnnnnnnnnnnnnnnnnnnnnnnnnnnnnnnnnnnnnnnnnnnnnnnnnnnnnnnnnnnnnnnnnnnnnnnnnnnnnnnnnnnnnnnnnnnnnnnnnnnnnnnnnnnnnnnnnnnnnnnnnnnnnnnnnnnnnnnnnnnnnnnnnnnnnnnnnnnnnnnnnnnnnnnnnnnnnnnnnnnnnnnnnnnnnnnnnnnnnnnnnnnnnnnnnnnnnnnnnnnnnnnnnnnnnnnnnnnnnnnnnnnnnnnnnnnnnnnnnnnnnnnnnnnnnnnnnnnnnnnnnnnnnnnnnnnnnnnnnnnnnnnnnnnnnnnnnnnnnnnnnnnnnnnnnnnnnnnnnnnnnnnnnnnnnnnnnnnnnnnnnnnnnnnnnnnnnnnnnnnnnnnnnnnnnnnnnnnnnnnnnnnnnnnnnnnnnnnnnnnnnnnnnnnnnnnnnnnnnnnnnnnnnnnnnnnnnnnnnnnnnnnnnnnnnnnnnnnnnnnnnnnnnnnnnnnnnnnnnnnnnnnnnnnnnnnnnnnnnnnnnnnnnnnnnnnnnnnnnnnnnnnnnnnnnnnnnnnnnnnnnnnnnnnnnnnnnnnnnnnnnnnnnnnnnnnnnnnnnnnnnnnnnnnnnnnnnnnnnnnnnnnnnnnnnnnnnnnnnnnnnnnnnnnnnnnnnnnnnnnnnnnnnnnnnnnnnnnnnnnnnnnnnnnnnnnnnnnnnnnnnnnnnnnnnnnnnnnnnnnnnnnnnnnnnnnnnnnnnnnnnnnnnnnnnnnnnnnnnnnnnnnnnnnnnnnnnnnnnnnnnnnnnnnnnnnnnnnnnnnnnnnnnnnnnnnnnnnnnnnnnnnnnnnnnnnnnnnnnnnnnnnnnnnnnnnnnnnnnnnnnnnnnnnnnnnnnnnnnnnnnnnnnnnnnnnnnnnnnnnnnnnnnnnnnnnnnnnnnnnnnnnnnnnnnnnnnnnnnnnnnnnnnnnnnnnnnnnnnnnnnnnnnnnnnnnnnnnnnnnnnnnnnnnnnnnnnnnnnnnnnnnnnnnnnnnnnnnnnnnnnnnnnnnnnnnnnnnnnnnnnnnnnnnnnnnnnnnnnnnnnnnnnnnnnnnnnnnnnnnnnnnnnnnnnnnnnnnnnnnnnnnnnnnnnnnnnnnnnnnnnnnnnnnnnnnnnnnnnnnnnnnnnnnnnnnnnnnnnnnnnnnnnnnnnnnnnnnnnnnnnnnnnnnnnnnnnnnnnnnnnnnnnnnnnnnnnnnnnnnnnnnnnnnnnnnnnnnnnnnnnnnnnnnnnnnnnnnnnnnnnnnnnnnnnnnnnnnnnnnnnnnnnnnnnnnnnnnnnnnnnnnnnnnnnnnnnnnnnnnnnnnnnnnnnnnnnnnnnnnnnnnnnnnnnnnnnnnnnnnnnnnnnnnnnnnnnnnnnnnnnnnnnnnnnnnnnnnnnnnnnnnnnnnnnnnnnnnnnnnnnnnnnnnnnnnnnnnnnnnnnnnnnnnnnnnnnnnnnnnnnnnnnnnnnnnnnnnnnnnnnnnnnnnnnnnnnnnnnnnnnnnnnnnnnnnnnnnnnnnnnnnnnnnnnnnnnnnnnnnnnnnnnnnnnnnnnnnnnnnnnnnnnnnnnnnnnnnnnnnnnnnnnnnnnnnnnnnnnnnnnnnnnnnnnnnnnnnnnnnnnnnnnnnnnnnnnnnnnnnnnnnnnnnnnnnnnnnnnnnnnnnnnnnnnnnnnnnnnnnnnnnnnnnnnnnnnnnnnnnnnnnnnnnnnnnnnnnnnnnnnnnnnnnnnnnnnnnnnnnnnnnnnnnnnnnnnnnnnnnnnnnnnnnnnnnnnnnnnnnnnnnnnnnnnnnnnnnnnnnnnnnnnnnnnnnnnnnnnnnnnnnnnnnnnnnnnnnnnnnnnnnnnnnnnnnnnnnnnnnnnnnnnnnnnnnnnnnnnnnnnnnnnnnnnnnnnnnnnnnnnnnnnnnnnnnnnnnnnnnnnnnnnnnnnnnnnnnnnnnnnnnnnnnnnnnnnnnnnnnnnnnnnnnnnnnnnnnnnnnnnnnnnnnnnnnnnnnnnnnnnnnnnnnnnnnnnnnnnnnnnnnnnnnnnnnnnnnnnnnnnnnnnnnnnnnnnnnnnnnnnnnnnnnnnnnnnnnnnnnnnnnnnnnnnnnnnnnnnnnnnnnnnnnnnnnnnnnnnnnnnnnnnnnnnnnnnnnnnnnnnnnnnnnnnnnnnnnnnnnnnnnnnnnnnnnnnnnnnnnnnnnnnnnnnnnnnnnnnnnnnnnnnnnnnnnnnnnnnnnnnnnnnnnnnnnnnnnnnnnnnnnnnnnnnnnnnnnnnnnnnnnnnnnnnnnnnnnnnnnnnnnnnnnnnnnnnnnnnnnnnnnnnnnnnnnnnnnnnnnnnnnnnnnnnnnnnnnnnnnnnnnnnnnnnnnnnnnnnnnnnnnnnnnnnnnnnnnnnnnnnnnnnnnnnnnnnnnnnnnnnnnnnnnnnnnnnnnnnnnnnnnnnnnnnnnnnnnnnnnnnnnnnnnnnnnnnnnnnnnnnnnnnnnnnnnnnnnnnnnnnnnnnnnnnnnnnnnnnnnnnnnnnnnnnnnnnnnnnnnnnnnnnnnnnnnnnnnnnnnnnnnnnnnnnnnnnnnnnnnnnnnnnnnnnnnnnnnnnnnnnnnnnnnnnnnnnnnnnnnnnnnnnnnnnnnnnnnnnnnnnnnnnnnnnnnnnnnnnnnnnnnnnnnnnnnnnnnnnnnnnnnnnnnnnnnnnnnnnnnnnnnnnnnnnnnnnnnnnnnnnnnnnnnnnnnnnnnnnnnnnnnnnnnnnnnnnnnnnnnnnnnnnnnnnnnnnnnnnnnnnnnnnnnnnnnnnnnnnnnnnnnnnnnnnnnnnnnnnnnnnnnnnnnnnnnnnnnnnnnnnnnnnnnnnnnnnnnnnnnnnnnnnnnnnnnnnnnnnnnnnnnnnnnnnnnnnnnnnnnnnnnnnnnnnnnnnnnnnnnnnnnnnnnnnnnnnnnnnnnnnnnnnnnnnnnnnnnnnnnnnnnnnnnnnnnnnnnnnnnnnnnnnnnnnnnnnnnnnnnnnnnnnnnnnnnnnnnnnnnnnnnnnnnnnnnnnnnnnnnnnnnnnnnnnnnnnnnnnnnnnnnnnnnnnnnnnnnnnnnnnnnnnnnnnnnnnnnnnnnnnnnnnnnnnnnnnnnnnnnnnnnnnnnnnnnnnnnnnnnnnnnnnnnnnnnnnnnnnnnnnnnnnnnnnnnnnnnnnnnnnnnnnnnnnnnnnnnnnnnnnnnnnnnnnnnnnnnnnnnnnnnnnnnnnnnnnnnnnnnnnnnnnnnnnnnnnnnnnnnnnnnnnnnnnnnnnnnnnnnnnnnnnnnnnnnnnnnnnnnnnnnnnnnnnnnnnnnnnnnnnnnnnnnnnnnnnnnnnnnnnnnnnnnnnnnnnnnnnnnnnnnnnnnnnnnnnnnnnnnnnnnnnnnnnnnnnnnnnnnnnnnnnnnnnnnnnnnnnnnnnnnnnnnnnnnnnnnnnnnnnnnnnnnnnnnnnnnnnnnnnnnnnnnnnnnnnnnnnnnnnnnnnnnnnnnnnnnnnnnnnnnnnnnnnnnnnnnnnnnnnnnnnnnnnnnnnnnnnnnnnnnnnnnnnnnnnnnnnnnnnnnnnnnnnnnnnnnnnnnnnnnnnnnnnnnnnnnnnnnnnnnnnnnnnnnnnnnnnnnnnnnnnnnnnnnnnnnnnnnnnnnnnnnnnnnnnnnnnnnnnnnnnnnnnnnnnnnnnnnnnnnnnnnnnnnnnnnnnnnnnnnnnnnnnnnnnnnnnnnnnnnnnnnnnnnnnnnnnnnnnnnnnnnnnnnnnnnnnnnnnnnnnnnnnnnnnnnnnnnnnnnnnnnnnnnnnnnnnnnnnnnnnnnnnnnnnnnnnnnnnnnnnnnnnnnnnnnnnnnnnnnnnnnnnnnnnnnnnnnnnnnnnnnnnnnnnnnnnnnnnnnnnnnnnnnnnnnnnnnnnnnnnnnnnnnnnnnnnnnnnnnnnnnnnnnnnnnnnnnnnnnnnnnnnnnnnnnnnnnnnnnnnnnnnnnnnnnnnnnnnnnnnnnnnnnnnnnnnnnnnnnnnnnnnnnnnnnnnnnnnnnnnnnnnnnnnnnnnnnnnnnnnnnnnnnnnnnnnnnnnnnnnnnnnnnnnnnnnnnnnnnnnnnnnnnnnnnnnnnnnnnnnnnnnnnnnnnnnnnnnnnnnnnnnnnnnnnnnnnnnnnnnnnnnnnnnnnnnnnnnnnnnnnnnnnnnnnnnnnnnnnnnnnnnnnnnnnnnnnnnnnnnnnnnnnnnnnnnnnnnnnnnnnnnnnnnnnnnnnnnnnnnnnnnnnnnnnnnnnnnnnnnnnnnnnnnnnnnnnnnnnnnnnnnnnnnnnnnnnnnnnnnnnnnnnnnnnnnnnnnnnnnnnnnnnnnnnnnnnnnnnnnnnnnnnnnnnnnnnnnnnnnnnnnnnnnnnnnnnnnnnnnnnnnnnnnnnnnnnnnnnnnnnnnnnnnnnnnnnnnnnnnnnnnnnnnnnnnnnnnnnnnnnnnnnnnnnnnnnnnnnnnnnnnnnnnnnnnnnnnnnnnnnnnnnnnnnnnnnnnnnnnnnnnnnnnnnnnnnnnnnnnnnnnnnnnnnnnnnnnnnnnnnnnnnnnnnnnnnnnnnnnnnnnnnnnnnnnnnnnnnnnnnnnnnnnnnnnnnnnnnnnnnnnnnnnnnnnnnnnnnnnnnnnnnnnnnnnnnnnnnnnnnnnnnnnnnnnnnnnnnnnnnnnnnnnnnnnnnnnnnnnnnnnnnnnnnnnnnnnnnnnnnnnnnnnnnnnnnnnnnnnnnnnnnnnnnnnnnnnnnnnnnnnnnnnnnnnnnnnnnnnnnnnnnnnnnnnnnnnnnnnnnnnnnnnnnnnnnnnnnnnnnnnnnnnnnnnnnnnnnnnnnnnnnnnnnnnnnnnnnnnnnnnnnnnnnnnnnnnnnnnnnnnnnnnnnnnnnnnnnnnnnnnnnnnnnnnnnnnnnnnnnnnnnnnnnnnnnnnnnnnnnnnnnnnnnnnnnnnnnnnnnnnnnnnnnnnnnnnnnnnnnnnnnnnnnnnnnnnnnnnnnnnnnnnnnnnnnnnnnnnnnnnnnnnnnnnnnnnnnnnnnnnnnnnnnnnnnnnnnnnnnnnnnnnnnnnnnnnnnnnnnnnnnnnnnnnnnnnnnnnnnnnnnnnnnnnnnnnnnnnnnnnnnnnnnnnnnnnnnnnnnnnnnnnnnnnnnnnnnnnnnnnnnnnnnnnnnnnnnnnnnnnnnnnnnnnnnnnnnnnnnnnnnnnnnnnnnnnnnnnnnnnnnnnnnnnnnnnnnnnnnnnnnnnnnnnnnnnnnnnnnnnnnnnnnnnnnnnnnnnnnnnnnnnnnnnnnnnnnnnnnnnnnnnnnnnnnnnnnnnnnnnnnnnnnnnnnnnnnnnnnnnnnnnnnnnnnnnnnnnnnnnnnnnnnnnnnnnnnnnnnnnnnnnnnnnnnnnnnnnnnnnnnnnnnnnnnnnnnnnnnnnnnnnnnnnnnnnnnnnnnnnnnnnnnnnnnnnnnnnnnnnnnnnnnnnnnnnnnnnnnnnnnnnnnnnnnnnnnnnnnnnnnnnnnnnnnnnnnnnnnnnnnnnnnnnnnnnnnnnnnnnnnnnnnnnnnnnnnnnnnnnnnnnnnnnnnnnnnnnnnnnnnnnnnnnnnnnnnnnnnnnnnnnnnnnnnnnnnnnnnnnnnnnnnnnnnnnnnnnnnnnnnnnnnnnnnnnnnnnnnnnnnnnnnnnnnnnnnnnnnnnnnnnnnnnnnnnnnnnnnnnnnnnnnnnnnnnnnnnnnnnnnnnnnnnnnnnnnnnnnnnnnnnnnnnnnnnnnnnnnnnnnnnnnnnnnnnnnnnnnnnnnnnnnnnnnnnnnnnnnnnnnnnnnnnnnnnnnnnnnnnnnnnnnnnnnnnnnnnnnnnnnnnnnnnnnnnnnnnnnnnnnnnnnnnnnnnnnnnnnnnnnnnnnnnnnnnnnnnnnnnnnnnnnnnnnnnnnnnnnnnnnnnnnnnnnnnnnnnnnnnnnnnnnnnnnnnnnnnnnnnnnnnnnnnnnnnnnnnnnnnnnnnnnnnnnnnnnnnnnnnnnnnnnnnnnnnnnnnnnnnnnnnnnnnnnnnnnnnnnnnnnnnnnnnnnnnnnnnnnnnnnnnnnnnnnnnnnnnnnnnnnnnnnnnnnnnnnnnnnnnnnnnnnnnnnnnnnnnnnnnnnnnnnnnnnnnnnnnnnnnnnnnnnnnnnnnnnnnnnnnnnnnnnnnnnnnnnnnnnnnnnnnnnnnnnnnnnnnnnnnnnnnnnnnnnnnnnnnnnnnnnnnnnnnnnnnnnnnnnnnnnnnnnnnnnnnnnnnnnnnnnnnnnnnnnnnnnnnnnnnnnnnnnnnnnnnnnnnnnnnnnnnnnnnnnnnnnnnnnnnnnnnnnnnnnnnnnnnnnnnnnnnnnnnnnnnnnnnnnnnnnnnnnnnnnnnnnnnnnnnnnnnnnnnnnnnnnnnnnnnnnnnnnnnnnnnnnnnnnnnnnnnnnnnnnnnnnnnnnnnnnnnnnnnnnnnnnnnnnnnnnnnnnnnnnnnnnnnnnnnnnnnnnnnnnnnnnnnnnnnnnnnnnnnnnnnnnnnnnnnnnnnnnnnnnnnnnnnnnnnnnnnnnnnnnnnnnnnnnnnnnnnnnnnnnnnnnnnnnnnnnnnnnnnnnnnnnnnnnnnnnnnnnnnnnnnnnnnnnnnnnnnnnnnnnnnnnnnnnnnnnnnnnnnnnnnnnnnnnnnnnnnnnnnnnnnnnnnnnnnnnnnnnnnnnnnnnnnnnnnnnnnnnnnnnnnnnnnnnnnnnnnnnnnnnnnnnnnnnnnnnnnnnnnnnnnnnnnnnnnnnnnnnnnnnnnnnnnnnnnnnnnnnnnnnnnnnnnnnnnnnnnnnnnnnnnnnnnnnnnnnnnnnnnnnnnnnnnnnnnnnnnnnnnnnnnnnnnnnnnnnnnnnnnnnnnnnnnnnnnnnnnnnnnnnnnnnnnnnnnnnnnnnnnnnnnnnnnnnnnnnnnnnnnnnnnnnnnnnnnnnnnnnnnnnnnnnnnnnnnnnnnnnnnnnnnnnnnnnnnnnnnnnnnnnnnnnnnnnnnnnnnnnnnnnnnnnnnnnnnnnnnnnnnnnnnnnnnnnnnnnnnnnnnnnnnnnnnnnnnnnnnnnnnnnnnnnnnnnnnnnnnnnnnnnnnnnnnnnnnnnnnnnnnnnnnnnnnnnnnnnnnnnnnnnnnnnnnnnnnnnnnnnnnnnnnnnnnnnnnnnnnnnnnnnnnnnnnnnnnnnnnnnnnnnnnnnnnnnnnnnnnnnnnnnnnnnnnnnnnnnnnnnnnnnnnnnnnnnnnnnnnnnnnnnnnnnnnnnnnnnnnnnnnnnnnnnnnnnnnnnnnnnnnnnnnnnnnnnnnnnnnnnnnnnnnnnnnnnnnnnnnnnnnnnnnnnnnnnnnnnnnnnnnnnnnnnnnnnnnnnnnnnnnnnnnnnnnnnnnnnnnnnnnnnnnnnnnnnnnnnnnnnnnnnnnnnnnnnnnnnnnnnnnnnnnnnnnnnnnnnnnnnnnnnnnnnnnnnnnnnnnnnnnnnnnnnnnnnnnnnnnnnnnnnnnnnnnnnnnnnnnnnnnnnnnnnnnnnnnnnnnnnnnnnnnnnnnnnnnnnnnnnnnnnnnnnnnnnnnnnnnnnnnnnnnnnnnnnnnnnnnnnnnnnnnnnnnnnnnnnnnnnnnnnnnnnnnnnnnnnnnnnnnnnnnnnnnnnnnnnnnnnnnnnnnnnnnnnnnnnnnnnnnnnnnnnnnnnnnnnnnnnnnnnnnnnnnnnnnnnnnnnnnnnnnnnnnnnnnnnnnnnnnnnnnnnnnnnnnnnnnnnnnnnnnnnnnnnnnnnnnnnnnnnnnnnnnnnnnnnnnnnnnnnnnnnnnnnnnnnnnnnnnnnnnnnnnnnnnnnnnnnnnnnnnnnnnnnnnnnnnnnnnnnnnnnnnnnnnnnnnnnnnnnnnnnnnnnnnnnnnnnnnnnnnnnnnnnnnnnnnnnnnnnnnnnnnnnnnnnnnnnnnnnnnnnnnnnnnnnnnnnnnnnnnnnnnnnnnnnnnnnnnnnnnnnnnnnnnnnnnnnnnnnnnnnnnnnnnnnnnnnnnnnnnnnnnnnnnnnnnnnnnnnnnnnnnnnnnnnnnnnnnnnnnnnnnnnnnnnnnnnnnnnnnnnnnnnnnnnnnnnnnnnnnnnnnnnnnnnnnnnnnnnnnnnnnnnnnnnnnnnnnnnnnnnnnnnnnnnnnnnnnnnnnnnnnnnnnnnnnnnnnnnnnnnnnnnnnnnnnnnnnnnnnnnnnnnnnnnnnnnnnnnnnnnnnnnnnnnnnnnnnnnnnnnnnnnnnnnnnnnnnnnnnnnnnnnnnnnnnnnnnnnnnnnnnnnnnnnnnnnnnnnnnnnnnnnnnnnnnnnnnnnnnnnnnnnnnnnnnnnnnnnnnnnnnnnnnnnnnnnnnnnnnnnnnnnnnnnnnnnnnnnnnnnnnnnnnnnnnnnnnnnnnnnnnnnnnnnnnnnnnnnnnnnnnnnnnnnnnnnnnnnnnnnnnnnnnnnnnnnnnnnnnnnnnnnnnnnnnnnnnnnnnnnnnnnnnnnnnnnnnnnnnnnnnnnnnnnnnnnnnnnnnnnnnnnnnnnnnnnnnnnnnnnnnnnnnnnnnnnnnnnnnnnnnnnnnnnnnnnnnnnnnnnnnnnnnnnnnnnnnnnnnnnnnnnnnnnnnnnnnnnnnnnnnnnnnnnnnnnnnnnnnnnnnnnnnnnnnnnnnnnnnnnnnnnnnnnnnnnnnnnnnnnnnnnnnnnnnnnnnnnnnnnnnnnnnnnnnnnnnnnnnnnnnnnnnnnnnnnnnnnnnnnnnnnnnnnnnnnnnnnnnnnnnnnnnnnnnnnnnnnnnnnnnnnnnnnnnnnnnnnnnnnnnnnnnnnnnnnnnnnnnnnnnnnnnnnnnnnnnnnnnnnnnnnnnnnnnnnnnnnnnnnnnnnnnnnnnnnnnnnnnnnnnnnnnnnnnnnnnnnnnnnnnnnnnnnnnnnnnnnnnnnnnnnnnnnnnnnnnnnnnnnnnnnnnnnnnnnnnnnnnnnnnnnnnnnnnnnnnnnnnnnnnnnnnnnnnnnnnnnnnnnnnnnnnnnnnnnnnnnnnnnnnnnnnnnnnnnnnnnnnnnnnnnnnnnnnnnnnnnnnnnnnnnnnnnnnnnnnnnnnnnnnnnnnnnnnnnnnnnnnnnnnnnnnnnnnnnnnnnnnnnnnnnnnnnnnnnnnnnnnnnnnnnnnnnnnnnnnnnnnnnnnnnnnnnnnnnnnnnnnnnnnnnnnnnnnnnnnnnnnnnnnnnnnnnnnnnnnnnnnnnnnnnnnnnnnnnnnnnnnnnnnnnnnnnnnnnnnnnnnnnnnnnnnnnnnnnnnnnnnnnnnnnnnnnnnnnnnnnnnnnnnnnnnnnnnnnnnnnnnnnnnnnnnnnnnnnnnnnnnnnnnnnnnnnnnnnnnnnnnnnnnnnnnnnnnnnnnnnnnnnnnnnnnnnnnnnnnnnnnnnnnnnnnnnnnnnnnnnnnnnnnnnnnnnnnnnnnnnnnnnnnnnnnnnnnnnnnnnnnnnnnnnnnnnnnnnnnnnnnnnnnnnnnnnnnnnnnnnnnnnnnnnnnnnnnnnnnnnnnnnnnnnnnnnnnnnnnnnnnnnnnnnnnnnnnnnnnnnnnnnnnnnnnnnnnnnnnnnnnnnnnnnnnnnnnnnnnnnnnnnnnnnnnnnnnnnnnnnnnnnnnnnnnnnnnnnnnnnnnnnnnnnnnnnnnnnnnnnnnnnnnnnnnnnnnnnnnnnnnnnnnnnnnnnnnnnnnnnnnnnnnnnnnnnnnnnnnnnnnnnnnnnnnnnnnnnnnnnnnnnnnnnnnnnnnnnnnnnnnnnnnnnnnnnnnnnnnnnnnnnnnnnnnnnnnnnnnnnnnnnnnnnnnnnnnnnnnnnnnnnnnnnnnnnnnnnnnnnnnnnnnnnnnnnnnnnnnnnnnnnnnnnnnnnnnnnnnnnnnnnnnnnnnnnnnnnnnnnnnnnnnnnnnnnnnnnnnnnnnnnnnnnnnnnnnnnnnnnnnnnnnnnnnnnnnnnnnnnnnnnnnnnnnnnnnnnnnnnnnnnnnnnnnnnnnnnnnnnnnnnnnnnnnnnnnnnnnnnnnnnnnnnnnnnnnnnnnnnnnnnnnnnnnnnnnnnnnnnnnnnnnnnnnnnnnnnnnnnnnnnnnnnnnnnnnnnnnnnnnnnnnnnnnnnnnnnnnnnnnnnnnnnnnnnnnnnnnnnnnnnnnnnnnnnnnnnnnnnnnnnnnnnnnnnnnnnnnnnnnnnnnnnnnnnnnnnnnnnnnnnnnnnnnnnnnnnnnnnnnnnnnnnnnnnnnnnnnnnnnnnnnnnnnnnnnnnnnnnnnnnnnnnnnnnnnnnnnnnnnnnnnnnnnnnnnnnnnnnnnnnnnnnnnnnnnnnnnnnnnnnnnnnnnnnnnnnnnnnnnnnnnnnnnnnnnnnnnnnnnnnnnnnnnnnnnnnnnnnnnnnnnnnnnnnnnnnnnnnnnnnnnnnnnnnnnnnnnnnnnnnnnnnnnnnnnnnnnnnnnnnnnnnnnnnnnnnnnnnnnnnnnnnnnnnnnnnnnnnnnnnnnnnnnnnnnnnnnnnnnnnnnnnnnnnnnnnnnnnnnnnnnnnnnnnnnnnnnnnnnnnnnnnnnnnnnnnnnnnnnnnnnnnnnnnnnnnnnnnnnnnnnnnnnnnnnnnnnnnnnnnnnnnnnnnnnnnnnnnnnnnnnnnnnnnnnnnnnnnnnnnnnnnnnnnnnnnnnnnnnnnnnnnnnnnnnnnnnnnnnnnnnnnnnnnnnnnnnnnnnnnnnnnnnnnnnnnnnnnnnnnnnnnnnnnnnnnnnnnnnnnnnnnnnnnnnnnnnnnnnnnnnnnnnnnnnnnnnnnnnnnnnnnnnnnnnnnnnnnnnnnnnnnnnnnnnnnnnnnnnnnnnnnnnnnnnnnnnnnnnnnnnnnnnnnnnnnnnnnnnnnnnnnnnnnnnnnnnnnnnnnnnnnnnnnnnnnnnnnnnnnnnnnnnnnnnnnnnnnnnnnnnnnnnnnnnnnnnnnnnnnnnnnnnnnnnnnnnnnnnnnnnnnnnnnnnnnnnnnnnnnnnnnnnnnnnnnnnnnnnnnnnnnnnnnnnnnnnnnnnnnnnnnnnnnnnnnnnnnnnnnnnnnnnnnnnnnnnnnnnnnnnnnnnnnnnnnnnnnnnnnnnnnnnnnnnnnnnnnnnnnnnnnnnnnnnnnnnnnnnnnnnnnnnnnnnnnnnnnnnnnnnnnnnnnnnnnnnnnnnnnnnnnnnnnnnnnnnnnnnnnnnnnnnnnnnnnnnnnnnnnnnnnnnnnnnnnnnnnnnnnnnnnnnnnnnnnnnnnnnnnnnnnnnnnnnnnnnnnnnnnnnnnnnnnnnnnnnnnnnnnnnnnnnnnnnnnnnnnnnnnnnnnnnnnnnnnnnnnnnnnnnnnnnnnnnnnnnnnnnnnnnnnnnnnnnnnnnnnnnnnnnnnnnnnnnnnnnnnnnnnnnnnnnnnnnnnnnnnnnnnnnnnnnnnnnnnnnnnnnnnnnnnnnnnnnnnnnnnnnnnnnnnnnnnnnnnnnnnnnnnnnnnnnnnnnnnnnnnnnnnnnnnnnnnnnnnnnnnnnnnnnnnnnnnnnnnnnnnnnnnnnnnnnnnnnnnnnnnnnnnnnnnnnnnnnnnnnnnnnnnnnnnnnnnnnnnnnnnnnnnnnnnnnnnnnnnnnnnnnnnnnnnnnnnnnnnnnnnnnnnnnnnnnnnnnnnnnnnnnnnnnnnnnnnnnnnnnnnnnnnnnnnnnnnnnnnnnnnnnnnnnnnnnnnnnnnnnnnnnnnnnnnnnnnnnnnnnnnnnnnnnnnnnnnnnnnnnnnnnnnnnnnnnnnnnnnnnnnnnnnnnnnnnnnnnnnnnnnnnnnnnnnnnnnnnnnnnnnnnnnnnnnnnnnnnnnnnnnnnnnnnnnnnnnnnnnnnnnnnnnnnnnnnnnnnnnnnnnnnnnnnnnnnnnnnnnnnnnnnnnnnnnnnnnnnnnnnnnnnnnnnnnnnnnnnnnnnnnnnnnnnnnnnnnnnnnnnnnnnnnnnnnnnnnnnnnnnnnnnnnnnnnnnnnnnnnnnnnnnnnnnnnnnnnnnnnnnnnnnnnnnnnnnnnnnnnnnnnnnnnnnnnnnnnnnnnnnnnnnnnnnnnnnnnnnnnnnnnnnnnnnnnnnnnnnnnnnnnnnnnnnnnnnnnnnnnnnnnnnnnnnnnnnnnnnnnnnnnnnnnnnnnnnnnnnnnnnnnnnnnnnnnnnnnnnnnnnnnnnnnnnnnnnnnnnnnnnnnnnnnnnnnnnnnnnnnnnnnnnnnnnnnnnnnnnnnnnnnnnnnnnnnnnnnnnnnnnnnnnnnnnnnnnnnnnnnnnnnnnnnnnnnnnnnnnnnnnnnnnnnnnnnnnnnnnnnnnnnnnnnnnnnnnnnnnnnnnnnnnnnnnnnnnnnnnnnnnnnnnnnnnnnnnnnnnnnnnnnnnnnnnnnnnnnnnnnnnnnnnnnnnnnnnnnnnnnnnnnnnnnnnnnnnnnnnnnnnnnnnnnnnnnnnnnnnnnnnnnnnnnnnnnnnnnnnnnnnnnnnnnnnnnnnnnnnnnnnnnnnnnnnnnnnnnnnnnnnnnnnnnnnnnnnnnnnnnnnnnnnnnnnnnnnnnnnnnnnnnnnnnnnnnnnnnnnnnnnnnnnnnnnnnnnnnnnnnnnnnnnnnnnnnnnnnnnnnnnnnnnnnnnnnnnnnnnnnnnnnnnnnnnnnnnnnnnnnnnnnnnnnnnnnnnnnnnnnnnnnnnnnnnnnnnnnnnnnnnnnnnnnnnnnnnnnnnnnnnnnnnnnnnnnnnnnnnnnnnnnnnnnnnnnnnnnnnnnnnnnnnnnnnnnnnnnnnnnnnnnnnnnnnnnnnnnnnnnnnnnnnnnnnnnnnnnnnnnnnnnnnnnnnnnnnnnnnnnnnnnnnnnnnnnnnnnnnnnnnnnnnnnnnnnnnnnnnnnnnnnnnnnnnnnnnnnnnnnnnnnnnnnnnnnnnnnnnnnnnnnnnnnnnnnnnnnnnnnnnnnnnnnnnnnnnnnnnnnnnnnnnnnnnnnnnnnnnnnnnnnnnnnnnnnnnnnnnnnnnnnnnnnnnnnnnnnnnnnnnnnnnnnnnnnnnnnnnnnnnnnnnnnnnnnnnnnnnnnnnnnnnnnnnnnnnnnnnnnnnnnnnnnnnnnnnnnnnnnnnnnnnnnnnnnnnnnnnnnnnnnnnnnnnnnnnnnnnnnnnnnnnnnnnnnnnnnnnnnnnnnnnnnnnnnnnnnnnnnnnnnnnnnnnnnnnnnnnnnnnnnnnnnnnnnnnnnnnnnnnnnnnnnnnnnnnnnnnnnnnnnnnnnnnnnnnnnnnnnnnnnnnnnnnnnnnnnnnnnnnnnnnnnnnnnnnnnnnnnnnnnnnnnnnnnnnnnnnnnnnnnnnnnnnnnnnnnnnnnnnnnnnnnnnnnnnnnnnnnnnnnnnnnnnnnnnnnnnnnnnnnnnnnnnnnnnnnnnnnnnnnnnnnnnnnnnnnnnnnnnnnnnnnnnnnnnnnnnnnnnnnnnnnnnnnnnnnnnnnnnnnnnnnnnnnnnnnnnnnnnnnnnnnnnnnnnnnnnnnnnnnnnnnnnnnnnnnnnnnnnnnnnnnnnnnnnnnnnnnnnnnnnnnnnnnnnnnnnnnnnnnnnnnnnnnnnnnnnnnnnnnnnnnnnnnnnnnnnnnnnnnnnnnnnnnnnnnnnnnnnnnnnnnnnnnnnnnnnnnnnnnnnnnnnnnnnnnnnnnnnnnnnnnnnnnnnnnnnnnnnnnnnnnnnnnnnnnnnnnnnnnnnnnnnnnnnnnnnnnnnnnnnnnnnnnnnnnnnnnnnnnnnnnnnnnnnnnnnnnnnnnnnnnnnnnnnnnnnnnnnnnnnnnnnnnnnnnnnnnnnnnnnnnnnnnnnnnnnnnnnnnnnnnnnnnnnnnnnnnnnnnnnnnnnnnnnnnnnnnnnnnnnnnnnnnnnnnnnnnnnnnnnnnnnnnnnnnnnnnnnnnnnnnnnnnnnnnnnnnnnnnnnnnnnnnnnnnnnnnnnnnnnnnnnnnnnnnnnnnnnnnnnnnnnnnnnnnnnnnnnnnnnnnnnnnnnnnnnnnnnnnnnnnnnnnnnnnnnnnnnnnnnnnnnnnnnnnnnnnnnnnnnnnnnnnnnnnnnnnnnnnnnnnnnnnnnnnnnnnnnnnnnnnnnnnnnnnnnnnnnnnnnnnnnnnnnnnnnnnnnnnnnnnnnnnnnnnnnnnnnnnnnnnnnnnnnnnnnnnnnnnnnnnnnnnnnnnnnnnnnnnnnnnnnnnnnnnnnnnnnnnnnnnnnnnnnnnnnnnnnnnnnnnnnnnnnnnnnnnnnnnnnnnnnnnnnnnnnnnnnnnnnnnnnnnnnnnnnnnnnnnnnnnnnnnnnnnnnnnnnnnnnnnnnnnnnnnnnnnnnnnnnnnnnnnnnnnnnnnnnnnnnnnnnnnnnnnnnnnnnnnnnnnnnnnnnnnnnnnnnnnnnnnnnnnnnnnnnnnnnnnnnnnnnnnnnnnnnnnnnnnnnnnnnnnnnnnnnnnnnnnnnnnnnnnnnnnnnnnnnnnnnnnnnnnnnnnnnnnnnnnnnnnnnnnnnnnnnnnnnnnnnnnnnnnnnnnnnnnnnnnnnnnnnnnnnnnnnnnnnnnnnnnnnnnnnnnnnnnnnnnnnnnnnnnnnnnnnnnnnnnnnnnnnnnnnnnnnnnnnnnnnnnnnnnnnnnnnnnnnnnnnnnnnnnnnnnnnnnnnnnnnnnnnnnnnnnnnnnnnnnnnnnnnnnnnnnnnnnnnnnnnnnnnnnnnnnnnnnnnnnnnnnnnnnnnnnnnnnnnnnnnnnnnnnnnnnnnnnnnnnnnnnnnnnnnnnnnnnnnnnnnnnnnnnnnnnnnnnnnnnnnnnnnnnnnnnnnnnnnnnnnnnnnnnnnnnnnnnnnnnnnnnnnnnnnnnnnnnnnnnnnnnnnnnnnnnnnnnnnnnnnnnnnnnnnnnnnnnnnnnnnnnnnnnnnnnnnnnnnnnnnnnnnnnnnnnnnnnnnnnnnnnnnnnnnnnnnnnnnnnnnnnnnnnnnnnnnnnnnnnnnnnnnnnnnnnnnnnnnnnnnnnnnnnnnnnnnnnnnnnnnnnnnnnnnnnnnnnnnnnnnnnnnnnnnnnnnnnnnnnnnnnnnnnnnnnnnnnnnnnnnnnnnnnnnnnnnnnnnnnnnnnnnnnnnnnnnnnnnnnnnnnnnnnnnnnnnnnnnnnnnnnnnnnnnnnnnnnnnnnnnnnnnnnnnnnnnnnnnnnnnnnnnnnnnnnnnnnnnnnnnnnnnnnnnnnnnnnnnnnnnnnnnnnnnnnnnnnnnnnnnnnnnnnnnnnnnnnnnnnnnnnnnnnnnnnnnnnnnnnnnnnnnnnnnnnnnnnnnnnnnnnnnnnnnnnnnnnnnnnnnnnnnnnnnnnnnnnnnnnnnnnnnnnnnnnnnnnnnnnnnnnnnnnnnnnnnnnnnnnnnnnnnnnnnnnnnnnnnnnnnnnnnnnnnnnnnnnnnnnnnnnnnnnnnnnnnnnnnnnnnnnnnnnnnnnnnnnnnnnnnnnnnnnnnnnnnnnnnnnnnnnnnnnnnnnnnnnnnnnnnnnnnnnnnnnnnnnnnnnnnnnnnnnnnnnnnnnnnnnnnnnnnnnnnnnnnnnnnnnnnnnnnnnnnnnnnnnnnnnnnnnnnnnnnnnnnnnnnnnnnnnnnnnnnnnnnnnnnnnnnnnnnnnnnnnnnnnnnnnnnnnnnnnnnnnnnnnnnnnnnnnnnnnnnnnnnnnnnnnnnnnnnnnnnnnnnnnnnnnnnnnnnnnnnnnnnnnnnnnnnnnnnnnnnnnnnnnnnnnnnnnnnnnnnnnnnnnnnnnnnnnnnnnnnnnnnnnnnnnnnnnnnnnnnnnnnnnnnnnnnnnnnnnnnnnnnnnnnnnnnnnnnnnnnnnnnnnnnnnnnnnnnnnnnnnnnnnnnnnnnnnnnnnnnnnnnnnnnnnnnnnnnnnnnnnnnnnnnnnnnnnnnnnnnnnnnnnnnnnnnnnnnnnnnnnnnnnnnnnnnnnnnnnnnnnnnnnnnnnnnnnnnnnnnnnnnnnnnnnnnnnnnnnnnnnnnnnnnnnnnnnnnnnnnnnnnnnnnnnnnnnnnnnnnnnnnnnnnnnnnnnnnnnnnnnnnnnnnnnnnnnnnnnnnnnnnnnnnnnnnnnnnnnnnnnnnnnnnnnnnnnnnnnnnnnnnnnnnnnnnnnnnnnnnnnnnnnnnnnnnnnnnnnnnnnnnnnnnnnnnnnnnnnnnnnnnnnnnnnnnnnnnnnnnnnnnnnnnnnnnnnnnnnnnnnnnnnnnnnnnnnnnnnnnnnnnnnnnnnnnnnnnnnnnnnnnnnnnnnnnnnnnnnnnnnnnnnnnnnnnnnnnnnnnnnnnnnnnnnnnnnnnnnnnnnnnnnnnnnnnnnnnnnnnnnnnnnnnnnnnnnnnnnnnnnnnnnnnnnnnnnnnnnnnnnnnnnnnnnnnnnnnnnnnnnnnnnnnnnnnnnnnnnnnnnnnnnnnnnnnnnnnnnnnnnnnnnnnnnnnnnnnnnnnnnnnnnnnnnnnnnnnnnnnnnnnnnnnnnnnnnnnnnnnnnnnnnnnnnnnnnnnnnnnnnnnnnnnnnnnnnnnnnnnnnnnnnnnnnnnnnnnnnnnnnnnnnnnnnnnnnnnnnnnnnnnnnnnnnnnnnnnnnnnnnnnnnnnnnnnnnnnnnnnnnnnnnnnnnnnnnnnnnnnnnnnnnnnnnnnnnnnnnnnnnnnnnnnnnnnnnnnnnnnnnnnnnnnnnnnnnnnnnnnnnnnnnnnnnnnnnnnnnnnnnnnnnnnnnnnnnnnnnnnnnnnnnnnnnnnnnnnnnnnnnnnnnnnnnnnnnnnnnnnnnnnnnnnnnnnnnnnnnnnnnnnnnnnnnnnnnnnnnnnnnnnnnnnnnnnnnnnnnnnnnnnnnnnnnnnnnnnnnnnnnnnnnnnnnnnnnnnnnnnnnnnnnnnnnnnnnnnnnnnnnnnnnnnnnnnnnnnnnnnnnnnnnnnnnnnnnnnnnnnnnnnnnnnnnnnnnnnnnnnnnnnnnnnnnnnnnnnnnnnnnnnnnnnnnnnnnnnnnnnnnnnnnnnnnnnnnnnnnnnnnnnnnnnnnnnnnnnnnnnnnnnnnnnnnnnnnnnnnnnnnnnnnnnnnnnnnnnnnnnnnnnnnnnnnnnnnnnnnnnnnnnnnnnnnnnnnnnnnnnnnnnnnnnnnnnnnnnnnnnnnnnnnnnnnnnnnnnnnnnnnnnnnnnnnnnnnnnnnnnnnnnnnnnnnnnnnnnnnnnnnnnnnnnnnnnnnnnnnnnnnnnnnnnnnnnnnnnnnnnnnnnnnnnnnnnnnnnnnnnnnnnnnnnnnnnnnnnnnnnnnnnnnnnnnnnnnnnnnnnnnnnnnnnnnnnnnnnnnnnnnnnnnnnnnnnnnnnnnnnnnnnnnnnnnnnnnnnnnnnnnnnnnnnnnnnnnnnnnnnnnnnnnnnnnnnnnnnnnnnnnnnnnnnnnnnnnnnnnnnnnnnnnnnnnnnnnnnnnnnnnnnnnnnnnnnnnnnnnnnnnnnnnnnnnnnnnnnnnnnnnnnnnnnnnnnnnnnnnnnnnnnnnnnnnnnnnnnnnnnnnnnnnnnnnnnnnnnnnnnnnnnnnnnnnnnnnnnnnnnnnnnnnnnnnnnnnnnnnnnnnnnnnnnnnnnnnnnnnnnnnnnnnnnnnnnnnnnnnnnnnnnnnnnnnnnnnnnnnnnnnnnnnnnnnnnnnnnnnnnnnnnnnnnnnnnnnnnnnnnnnnnnnnnnnnnnnnnnnnnnnnnnnnnnnnnnnnnnnnnnnnnnnnnnnnnnnnnnnnnnnnnnnnnnnnnnnnnnnnnnnnnnnnnnnnnnnnnnnnnnnnnnnnnnnnnnnnnnnnnnnnnnnnnnnnnnnnnnnnnnnnnnnnnnnnnnnnnnnnnnnnnnnnnnnnnnnnnnnnnnnnnnnnnnnnnnnnnnnnnnnnnnnnnnnnnnnnnnnnnnnnnnnnnnnnnnnnnnnnnnnnnnnnnnnnnnnnnnnnnnnnnnnnnnnnnnnnnnnnnnnnnnnnnnnnnnnnnnnnnnnnnnnnnnnnnnnnnnnnnnnnnnnnnnnnnnnnnnnnnnnnnnnnnnnnnnnnnnnnnnnnnnnnnnnnnnnnnnnnnnnnnnnnnnnnnnnnnnnnnnnnnnnnnnnnnnnnnnnnnnnnnnnnnnnnnnnnnnnnnnnnnnnnnnnnnnnnnnnnnnnnnnnnnnnnnnnnnnnnnnnnnnnnnnnnnnnnnnnnnnnnnnnnnnnnnnnnnnnnnnnnnnnnnnnnnnnnnnnnnnnnnnnnnnnnnnnnnnnnnnnnnnnnnnnnnnnnnnnnnnnnnnnnnnnnnnnnnnnnnnnnnnnnnnnnnnnnnnnnnnnnnnnnnnnnnnnnnnnnnnnnnnnnnnnnnnnnnnnnnnnnnnnnnnnnnnnnnnnnnnnnnnnnnnnnnnnnnnnnnnnnnnnnnnnnnnnnnnnnnnnnnnnnnnnnnnnnnnnnnnnnnnnnnnnnnnnnnnnnnnnnnnnnnnnnnnnnnnnnnnnnnnnnnnnnnnnnnnnnnnnnnnnnnnnnnnnnnnnnnnnnnnnnnnnnnnnnnnnnnnnnnnnnnnnnnnnnnnnnnnnnnnnnnnnnnnnnnnnnnnnnnnnnnnnnnnnnnnnnnnnnnnnnnnnnnnnnnnnnnnnnnnnnnnnnnnnnnnnnnnnnnnnnnnnnnnnnnnnnnnnnnnnnnnnnnnnnnnnnnnnnnnnnnnnnnnnnnnnnnnnnnnnnnnnnnnnnnnnnnnnnnnnnnnnnnnnnnnnnnnnnnnnnnnnnnnnnnnnnnnnnnnnnnnnnnnnnnnnnnnnnnnnnnnnnnnnnnnnnnnnnnnnnnnnnnnnnnnnnnnnnnnnnnnnnnnnnnnnnnnnnnnnnnnnnnnnnnnnnnnnnnnnnnnnnnnnnnnnnnnnnnnnnnnnnnnnnnnnnnnnnnnnnnnnnnnnnnnnnnnnnnnnnnnnnnnnnnnnnnnnnnnnnnnnnnnnnnnnnnnnnnnnnnnnnnnnnnnnnnnnnnnnnnnnnnnnnnnnnnnnnnnnnnnnnnnnnnnnnnnnnnnnnnnnnnnnnnnnnnnnnnnnnnnnnnnnnnnnnnnnnnnnnnnnnnnnnnnnnnnnnnnnnnnnnnnnnnnnnnnnnnnnnnnnnnnnnnnnnnnnnnnnnnnnnnnnnnnnnnnnnnnnnnnnnnnnnnnnnnnnnnnnnnnnnnnnnnnnnnnnnnnnnnnnnnnnnnnnnnnnnnnnnnnnnnnnnnnnnnnnnnnnnnnnnnnnnnnnnnnnnnnnnnnnnnnnnnnnnnnnnnnnnnnnnnnnnnnnnnnnnnnnnnnnnnnnnnnnnnnnnnnnnnnnnnnnnnnnnnnnnnnnnnnnnnnnnnnnnnnnnnnnnnnnnnnnnnnnnnnnnnnnnnnnnnnnnnnnnnnnnnnnnnnnnnnnnnnnnnnnnnnnnnnnnnnnnnnnnnnnnnnnnnnnnnnnnnnnnnnnnnnnnnnnnnnnnnnnnnnnnnnnnnnnnnnnnnnnnnnnnnnnnnnnnnnnnnnnnnnnnnnnnnnnnnnnnnnnnnnnnnnnnnnnnnnnnnnnnnnnnnnnnnnnnnnnnnnnnnnnnnnnnnnnnnnnnnnnnnnnnnnnnnnnnnnnnnnnnnnnnnnnnnnnnnnnnnnnnnnnnnnnnnnnnnnnnnnnnnnnnnnnnnnnnnnnnnnnnnnnnnnnnnnnnnnnnnnnnnnnnnnnnnnnnnnnnnnnnnnnnnnnnnnnnnnnnnnnnnnnnnnnnnnnnnnnnnnnnnnnnnnnnnnnnnnnnnnnnnnnnnnnnnnnnnnnnnnnnnnnnnnnnnnnnnnnnnnnnnnnnnnnnnnnnnnnnnnnnnnnnnnnnnnnnnnnnnnnnnnnnnnnnnnnnnnnnnnnnnnnnnnnnnnnnnnnnnnnnnnnnnnnnnnnnnnnnnnnnnnnnnnnnnnnnnnnnnnnnnnnnnnnnnnnnnnnnnnnnnnnnnnnnnnnnnnnnnnnnnnnnnnnnnnnnnnnnnnnnnnnnnnnnnnnnnnnnnnnnnnnnnnnnnnnnnnnnnnnnnnnnnnnnnnnnnnnnnnnnnnnnnnnnnnnnnnnnnnnnnnnnnnnnnnnnnnnnnnnnnnnnnnnnnnnnnnnnnnnnnnnnnnnnnnnnnnnnnnnnnnnnnnnnnnnnnnnnnnnnnnnnnnnnnnnnnnnnnnnnnnnnnnnnnnnnnnnnnnnnnnnnnnnnnnnnnnnnnnnnnnnnnnnnnnnnnnnnnnnnnnnnnnnnnnnnnnnnnnnnnnnnnnnnnnnnnnnnnnnnnnnnnnnnnnnnnnnnnnnnnnnnnnnnnnnnnnnnnnnnnnnnnnnnnnnnnnnnnnnnnnnnnnnnnnnnnnnnnnnnnnnnnnnnnnnnnnnnnnnnnnnnnnnnnnnnnnnnnnnnnnnnnnnnnnnnnnnnnnnnnnnnnnnnnnnnnnnnnnnnnnnnnnnnnnnnnnnnnnnnnnnnnnnnnnnnnnnnnnnnnnnnnnnnnnnnnnnnnnnnnnnnnnnnnnnnnnnnnnnnnnnnnnnnnnnnnnnnnnnnnnnnnnnnnnnnnnnnnnnnnnnnnnnnnnnnnnnnnnnnnnnnnnnnnnnnnnnnnnnnnnnnnnnnnnnnnnnnnnnnnnnnnnnnnnnnnnnnnnnnnnnnnnnnnnnnnnnnnnnnnnnnnnnnnnnnnnnnnnnnnnnnnnnnnnnnnnnnnnnnnnnnnnnnnnnnnnnnnnnnnnnnnnnnnnnnnnnnnnnnnnnnnnnnnnnnnnnnnnnnnnnnnnnnnnnnnnnnnnnnnnnnnnnnnnnnnnnnnnnnnnnnnnnnnnnnnnnnnnnnnnnnnnnnnnnnnnnnnnnnnnnnnnnnnnnnnnnnnnnnnnnnnnnnnnnnnnnnnnnnnnnnnnnnnnnnnnnnnnnnnnnnnnnnnnnnnnnnnnnnnnnnnnnnnnnnnnnnnnnnnnnnnnnnnnnnnnnnnnnnnnnnnnnnnnnnnnnnnnnnnnnnnnnnnnnnnnnnnnnnnnnnnnnnnnnnnnnnnnnnnnnnnnnnnnnnnnnnnnnnnnnnnnnnnnnnnnnnnnnnnnnnnnnnnnnnnnnnnnnnnnnnnnnnnnnnnnnnnnnnnnnnnnnnnnnnnnnnnnnnnnnnnnnnnnnnnnnnnnnnnnnnnnnnnnnnnnnnnnnnnnnnnnnnnnnnnnnnnnnnnnnnnnnnnnnnnnnnnnnnnnnnnnnnnnnnnnnnnnnnnnnnnnnnnnnnnnnnnnnnnnnnnnnnnnnnnnnnnnnnnnnnnnnnnnnnnnnnnnnnnnnnnnnnnnnnnnnnnnnnnnnnnnnnnnnnnnnnnnnnnnnnnnnnnnnnnnnnnnnnnnnnnnnnnnnnnnnnnnnnnnnnnnnnnnnnnnnnnnnnnnnnnnnnnnnnnnnnnnnnnnnnnnnnnnnnnnnnnnnnnnnnnnnnnnnnnnnnnnnnnnnnnnnnnnnnnnnnnnnnnnnnnnnnnnnnnnnnnnnnnnnnnnnnnnnnnnnnnnnnnnnnnnnnnnnnnnnnnnnnnnnnnnnnnnnnnnnnnnnnnnnnnnnnnnnnnnnnnnnnnnnnnnnnnnnnnnnnnnnnnnnnnnnnnnnnnnnnnnnnnnnnnnnnnnnnnnnnnnnnnnnnnnnnnnnnnnnnnnnnnnnnnnnnnnnnnnnnnnnnnnnnnnnnnnnnnnnnnnnnnnnnnnnnnnnnnnnnnnnnnnnnnnnnnnnnnnnnnnnnnnnnnnnnnnnnnnnnnnnnnnnnnnnnnnnnnnnnnnnnnnnnnnnnnnnnnnnnnnnnnnnnnnnnnnnnnnnnnnnnnnnnnnnnnnnnnnnnnnnnnnnnnnnnnnnnnnnnnnnnnnnnnnnnnnnnnnnnnnnnnnnnnnnnnnnnnnnnnnnnnnnnnnnnnnnnnnnnnnnnnnnnnnnnnnnnnnnnnnnnnnnnnnnnnnnnnnnnnnnnnnnnnnnnnnnnnnnnnnnnnnnnnnnnnnnnnnnnnnnnnnnnnnnnnnnnnnnnnnnnnnnnnnnnnnnnnnnnnnnnnnnnnnnnnnnnnnnnnnnnnnnnnnnnnnnnnnnnnnnnnnnnnnnnnnnnnnnnnnnnnnnnnnnnnnnnnnnnnnnnnnnnnnnnnnnnnnnnnnnnnnnnnnnnnnnnnnnnnnnnnnnnnnnnnnnnnnnnnnnnnnnnnnnnnnnnnnnnnnnnnnnnnnnnnnnnnnnnnnnnnnnnnnnnnnnnnnnnnnnnnnnnnnnnnnnnnnnnnnnnnnnnnnnnnnnnnnnnnnnnnnnnnnnnnnnnnnnnnnnnnnnnnnnnnnnnnnnnnnnnnnnnnnnnnnnnnnnnnnnnnnnnnnnnnnnnnnnnnnnnnnnnnnnnnnnnnnnnnnnnnnnnnnnnnnnnnnnnnnnnnnnnnnnnnnnnnnnnnnnnnnnnnnnnnnnnnnnnnnnnnnnnnnnnnnnnnnnnnnnnnnnnnnnnnnnnnnnnnnnnnnnnnnnnnnnnnnnnnnnnnnnnnnnnnnnnnnnnnnnnnnnnnnnnnnnnnnnnnnnnnnnnnnnnnnnnnnnnnnnnnnnnnnnnnnnnnnnnnnnnnnnnnnnnnnnnnnnnnnnnnnnnnnnnnnnnnnnnnnnnnnnnnnnnnnnnnnnnnnnnnnnnnnnnnnnnnnnnnnnnnnnnnnnnnnnnnnnnnnnnnnnnnnnnnnnnnnnnnnnnnnnnnnnnnnnnnnnnnnnnnnnnnnnnnnnnnnnnnnnnnnnnnnnnnnnnnnnnnnnnnnnnnnnnnnnnnnnnnnnnnnnnnnnnnnnnnnnnnnnnnnnnnnnnnnnnnnnnnnnnnnnnnnnnnnnnnnnnnnnnnnnnnnnnnnnnnnnnnnnnnnnnnnnnnnnnnnnnnnnnnnnnnnnnnnnnnnnnnnnnnnnnnnnnnnnnnnnnnnnnnnnnnnnnnnnnnnnnnnnnnnnnnnnnnnnnnnnnnnnnnnnnnnnnnnnnnnnnnnnnnnnnnnnnnnnnnnnnnnnnnnnnnnnnnnnnnnnnnnnnnnnnnnnnnnnnnnnnnnnnnnnnnnnnnnnnnnnnnnnnnnnnnnnnnnnnnnnnnnnnnnnnnnnnnnnnnnnnnnnnnnnnnnnnnnnnnnnnnnnnnnnnnnnnnnnnnnnnnnnnnnnnnnnnnnnnnnnnnnnnnnnnnnnnnnnnnnnnnnnnnnnnnnnnnnnnnnnnnnnnnnnnnnnnnnnnnnnnnnnnnnnnnnnnnnnnnnnnnnnnnnnnnnnnnnnnnnnnnnnnnnnnnnnnnnnnnnnnnnnnnnnnnnnnnnnnnnnnnnnnnnnnnnnnnnnnnnnnnnnnnnnnnnnnnnnnnnnnnnnnnnnnnnnnnnnnnnnnnnnnnnnnnnnnnnnnnnnnnnnnnnnnnnnnnnnnnnnnnnnnnnnnnnnnnnnnnnnnnnnnnnnnnnnnnnnnnnnnnnnnnnnnnnnnnnnnnnnnnnnnnnnnnnnnnnnnnnnnnnnnnnnnnnnnnnnnnnnnnnnnnnnnnnnnnnnnnnnnnnnnnnnnnnnnnnnnnnnnnnnnnnnnnnnnnnnnnnnnnnnnnnnnnnnnnnnnnnnnnnnnnnnnnnnnnnnnnnnnnnnnnnnnnnnnnnnnnnnnnnnnnnnnnnnnnnnnnnnnnnnnnnnnnnnnnnnnnnnnnnnnnnnnnnnnnnnnnnnnnnnnnnnnnnnnnnnnnnnnnnnnnnnnnnnnnnnnnnnnnnnnnnnnnnnnnnnnnnnnnnnnnnnnnnnnnnnnnnnnnnnnnnnnnnnnnnnnnnnnnnnnnnnnnnnnnnnnnnnnnnnnnnnnnnnnnnnnnnnnnnnnnnnnnnnnnnnnnnnnnnnnnnnnnnnnnnnnnnnnnnnnnnnnnnnnnnnnnnnnnnnnnnnnnnnnnnnnnnnnnnnnnnnnnnnnnnnnnnnnnnnnnnnnnnnnnnnnnnnnnnnnnnnnnnnnnnnnnnnnnnnnnnnnnnnnnnnnnnnnnnnnnnnnnnnnnnnnnnnnnnnnnnnnnnnnnnnnnnnnnnnnnnnnnnnnnnnnnnnnnnnnnnnnnnnnnnnnnnnnnnnnnnnnnnnnnnnnnnnnnnnnnnnnnnnnnnnnnnnnnnnnnnnnnnnnnnnnnnnnnnnnnnnnnnnnnnnnnnnnnnnnnnnnnnnnnnnnnnnnnnnnnnnnnnnnnnnnnnnnnnnnnnnnnnnnnnnnnnnnnnnnnnnnnnnnnnnnnnnnnnnnnnnnnnnnnnnnnnnnnnnnnnnnnnnnnnnnnnnnnnnnnnnnnnnnnnnnnnnnnnnnnnnnnnnnnnnnnnnnnnnnnnnnnnnnnnnnnnnnnnnnnnnnnnnnnnnnnnnnnnnnnnnnnnnnnnnnnnnnnnnnnnnnnnnnnnnnnnnnnnnnnnnnnnnnnnnnnnnnnnnnnnnnnnnnnnnnnnnnnnnnnnnnnnnnnnnnnnnnnnnnnnnnnnnnnnnnnnnnnnnnnnnnnnnnnnnnnnnnnnnnnnnnnnnnnnnnnnnnnnnnnnnnnnnnnnnnnnnnnnnnnnnnnnnnnnnnnnnnnnnnnnnnnnnnnnnnnnnnnnnnnnnnnnnnnnnnnnnnnnnnnnnnnnnnnnnnnnnnnnnnnnnnnnnnnnnnnnnnnnnnnnnnnnnnnnnnnnnnnnnnnnnnnnnnnnnnnnnnnnnnnnnnnnnnnnnnnnnnnnnnnnnnnnnnnnnnnnnnnnnnnnnnnnnnnnnnnnnnnnnnnnnnnnnnnnnnnnnnnnnnnnnnnnnnnnnnnnnnnnnnnnnnnnnnnnnnnnnnnnnnnnnnnnnnnnnnnnnnnnnnnnnnnnnnnnnnnnnnnnnnnnnnnnnnnnnnnnnnnnnnnnnnnnnnnnnnnnnnnnnnnnnnnnnnnnnnnnnnnnnnnnnnnnnnnnnnnnnnnnnnnnnnnnnnnnnnnnnnnnnnnnnnnnnnnnnnnnnnnnnnnnnnnnnnnnnnnnnnnnnnnnnnnnnnnnnnnnnnnnnnnnnnnnnnnnnnnnnnnnnnnnnnnnnnnnnnnnnnnnnnnnnnnnnnnnnnnnnnnnnnnnnnnnnnnnnnnnnnnnnnnnnnnnnnnnnnnnnnnnnnnnnnnnnnnnnnnnnnnnnnnnnnnnnnnnnnnnnnnnnnnnnnnnnnnnnnnnnnnnnnnnnnnnnnnnnnnnnnnnnnnnnnnnnnnnnnnnnnnnnnnnnnnnnnnnnnnnnnnnnnnnnnnnnnnnnnnnnnnnnnnnnnnnnnnnnnnnnnnnnnnnnnnnnnnnnnnnnnnnnnnnnnnnnnnnnnnnnnnnnnnnnnnnnnnnnnnnnnnnnnnnnnnnnnnnnnnnnnnnnnnnnnnnnnnnnnnnnnnnnnnnnnnnnnnnnnnnnnnnnnnnnnnnnnnnnnnnnnnnnnnnnnnnnnnnnnnnnnnnnnnnnnnnnnnnnnnnnnnnnnnnnnnnnnnnnnnnnnnnnnnnnnnnnnnnnnnnnnnnnnnnnnnnnnnnnnnnnnnnnnnnnnnnnnnnnnnnnnnnnnnnnnnnnnnnnnnnnnnnnnnnnnnnnnnnnnnnnnnnnnnnnnnnnnnnnnnnnnnnnnnnnnnnnnnnnnnnnnnnnnnnnnnnnnnnnnnnnnnnnnnnnnnnnnnnnnnnnnnnnnnnnnnnnnnnnnnnnnnnnnnnnnnnnnnnnnnnnnnnnnnnnnnnnnnnnnnnnnnnnnnnnnnnnnnnnnnnnnnnnnnnnnnnnnnnnnnnnnnnnnnnnnnnnnnnnnnnnnnnnnnnnnnnnnnnnnnnnnnnnnnnnnnnnnnnnnnnnnnnnnnnnnnnnnnnnnnnnnnnnnnnnnnnnnnnnnnnnnnnnnnnnnnnnnnnnnnnnnnnnnnnnnnnnnnnnnnnnnnnnnnnnnnnnnnnnnnnnnnnnnnnnnnnnnnnnnnnnnnnnnnnnnnnnnnnnnnnnnnnnnnnnnnnnnnnnnnnnnnnnnnnnnnnnnnnnnnnnnnnnnnnnnnnnnnnnnnnnnnnnnnnnnnnnnnnnnnnnnnnnnnnnnnnnnnnnnnnnnnnnnnnnnnnnnnnnnnnnnnnnnnnnnnnnnnnnnnnnnnnnnnnnnnnnnnnnnnnnnnnnnnnnnnnnnnnnnnnnnnnnnnnnnnnnnnnnnnnnnnnnnnnnnnnnnnnnnnnnnnnnnnnnnnnnnnnnnnnnnnnnnnnnnnnnnnnnnnnnnnnnnnnnnnnnnnnnnnnnnnnnnnnnnnnnnnnnnnnnnnnnnnnnnnnnnnnnnnnnnnnnnnnnnnnnnnnnnnnnnnnnnnnnnnnnnnnnnnnnnnnnnnnnnnnnnnnnnnnnnnnnnnnnnnnnnnnnnnnnnnnnnnnnnnnnnnnnnnnnnnnnnnnnnnnnnnnnnnnnnnnnnnnnnnnnnnnnnnnnnnnnnnnnnnnnnnnnnnnnnnnnnnnnnnnnnnnnnnnnnnnnnnnnnnnnnnnnnnnnnnnnnnnnnnnnnnnnnnnnnnnnnnnnnnnnnnnnnnnnnnnnnnnnnnnnnnnnnnnnnnnnnnnnnnnnnnnnnnnnnnnnnnnnnnnnnnnnnnnnnnnnnnnnnnnnnnnnnnnnnnnnnnnnnnnnnnnnnnnnnnnnnnnnnnnnnnnnnnnnnnnnnnnnnnnnnnnnnnnnnnnnnnnnnnnnnnnnnnnnnnnnnnnnnnnnnnnnnnnnnnnnnnnnnnnnnnnnnnnnnnnnnnnnnnnnnnnnnnnnnnnnnnnnnnnnnnnnnnnnnnnnnnnnnnnnnnnnnnnnnnnnnnnnnnnnnnnnnnnnnnnnnnnnnnnnnnnnnnnnnnnnnnnnnnnnnnnnnnnnnnnnnnnnnnnnnnnnnnnnnnnnnnnnnnnnnnnnnnnnnnnnnnnnnnnnnnnnnnnnnnnnnnnnnnnnnnnnnnnnnnnnnnnnnnnnnnnnnnnnnnnnnnnnnnnnnnnnnnnnnnnnnnnnnnnnnnnnnnnnnnnnnnnnnnnnnnnnnnnnnnnnnnnnnnnnnnnnnnnnnnnnnnnnnnnnnnnnnnnnnnnnnnnnnnnnnnnnnnnnnnnnnnnnnnnnnnnnnnnnnnnnnnnnnnnnnnnnnnnnnnnnnnnnnnnnnnnnnnnnnnnnnnnnnnnnnnnnnnnnnnnnnnnnnnnnnnnnnnnnnnnnnnnnnnnnnnnnnnnnnnnnnnnnnnnnnnnnnnnnnnnnnnnnnnnnnnnnnnnnnnnnnnnnnnnnnnnnnnnnnnnnnnnnnnnnnnnnnnnnnnnnnnnnnnnnnnnnnnnnnnnnnnnnnnnnnnnnnnnnnnnnnnnnnnnnnnnnnnnnnnnnnnnnnnnnnnnnnnnnnnnnnnnnnnnnnnnnnnnnnnnnnnnnnnnnnnnnnnnnnnnnnnnnnnnnnnnnnnnnnnnnnnnnnnnnnnnnnnnnnnnnnnnnnnnnnnnnnnnnnnnnnnnnnnnnnnnnnnnnnnnnnnnnnnnnnnnnnnnnnnnnnnnnnnnnnnnnnnnnnnnnnnnnnnnnnnnnnnnnnnnnnnnnnnnnnnnnnnnnnnnnnnnnnnnnnnnnnnnnnnnnnnnnnnnnnnnnnnnnnnnnnnnnnnnnnnnnnnnnnnnnnnnnnnnnnnnnnnnnnnnnnnnnnnnnnnnnnnnnnnnnnnnnnnnnnnnnnnnnnnnnnnnnnnnnnnnnnnnnnnnnnnnnnnnnnnnnnnnnnnnnnnnnnnnnnnnnnnnnnnnnnnnnnnnnnnnnnnnnnnnnnnnnnnnnnnnnnnnnnnnnnnnnnnnnnnnnnnnnnnnnnnnnnnnnnnnnnnnnnnnnnnnnnnnnnnnnnnnnnnnnnnnnnnnnnnnnnnnnnnnnnnnnnnnnnnnnnnnnnnnnnnnnnnnnnnnnnnnnnnnnnnnnnnnnnnnnnnnnnnnnnnnnnnnnnnnnnnnnnnnnnnnnnnnnnnnnnnnnnnnnnnnnnnnnnnnnnnnnnnnnnnnnnnnnnnnnnnnnnnnnnnnnnnnnnnnnnnnnnnnnnnnnnnnnnnnnnnnnnnnnnnnnnnnnnnnnnnnnnnnnnnnnnnnnnnnnnnnnnnnnnnnnnnnnnnnnnnnnnnnnnnnnnnnnnnnnnnnnnnnnnnnnnnnnnnnnnnnnnnnnnnnnnnnnnnnnnnnnnnnnnnnnnnnnnnnnnnnnnnnnnnnnnnnnnnnnnnnnnnnnnnnnnnnnnnnnnnnnnnnnnnnnnnnnnnnnnnnnnnnnnnnnnnnnnnnnnnnnnnnnnnnnnnnnnnnnnnnnnnnnnnnnnnnnnnnnnnnnnnnnnnnnnnnnnnnnnnnnnnnnnnnnnnnnnnnnnnnnnnnnnnnnnnnnnnnnnnnnnnnnnnnnnnnnnnnnnnnnnnnnnnnnnnnnnnnnnnnnnnnnnnnnnnnnnnnnnnnnnnnnnnnnnnnnnnnnnnnnnnnnnnnnnnnnnnnnnnnnnnnnnnnnnnnnnnnnnnnnnnnnnnnnnnnnnnnnnnnnnnnnnnnnnnnnnnnnnnnnnnnnnnnnnnnnnnnnnnnnnnnnnnnnnnnnnnnnnnnnnnnnnnnnnnnnnnnnnnnnnnnnnnnnnnnnnnnnnnnnnnnnnnnnnnnnnnnnnnnnnnnnnnnnnnnnnnnnnnnnnnnnnnnnnnnnnnnnnnnnnnnnnnnnnnnnnnnnnnnnnnnnnnnnnnnnnnnnnnnnnnnnnnnnnnnnnnnnnnnnnnnnnnnnnnnnnnnnnnnnnnnnnnnnnnnnnnnnnnnnnnnnnnnnnnnnnnnnnnnnnnnnnnnnnnnnnnnnnnnnnnnnnnnnnnnnnnnnnnnnnnnnnnnnnnnnnnnnnnnnnnnnnnnnnnnnnnnnnnnnnnnnnnnnnnnnnnnnnnnnnnnnnnnnnnnnnnnnnnnnnnnnnnnnnnnnnnnnnnnnnnnnnnnnnnnnnnnnnnnnnnnnnnnnnnnnnnnnnnnnnnnnnnnnnnnnnnnnnnnnnnnnnnnnnnnnnnnnnnnnnnnnnnnnnnnnnnnnnnnnnnnnnnnnnnnnnnnnnnnnnnnnnnnnnnnnnnnnnnnnnnnnnnnnnnnnnnnnnnnnnnnnnnnnnnnnnnnnnnnnnnnnnnnnnnnnnnnnnnnnnnnnnnnnnnnnnnnnnnnnnnnnnnnnnnnnnnnnnnnnnnnnnnnnnnnnnnnnnnnnnnnnnnnnnnnnnnnnnnnnnnnnnnnnnnnnnnnnnnnnnnnnnnnnnnnnnnnnnnnnnnnnnnnnnnnnnnnnnnnnnnnnnnnnnnnnnnnnnnnnnnnnnnnnnnnnnnnnnnnnnnnnnnnnnnnnnnnnnnnnnnnnnnnnnnnnnnnnnnnnnnnnnnnnnnnnnnnnnnnnnnnnnnnnnnnnnnnnnnnnnnnnnnnnnnnnnnnnnnnnnnnnnnnnnnnnnnnnnnnnnnnnnnnnnnnnnnnnnnnnnnnnnnnnnnnnnnnnnnnnnnnnnnnnnnnnnnnnnnnnnnnnnnnnnnnnnnnnnnnnnnnnnnnnnnnnnnnnnnnnnnnnnnnnnnnnnnnnnnnnnnnnnnnnnnnnnnnnnnnnnnnnnnnnnnnnnnnnnnnnnnnnnnnnnnnnnnnnnnnnnnnnnnnnnnnnnnnnnnnnnnnnnnnnnnnnnnnnnnnnnnnnnnnnnnnnnnnnnnnnnnnnnnnnnnnnnnnnnnnnnnnnnnnnnnnnnnnnnnnnnnnnnnnnnnnnnnnnnnnnnnnnnnnnnnnnnnnnnnnnnnnnnnnnnnnnnnnnnnnnnnnnnnnnnnnnnnnnnnnnnnnnnnnnnnnnnnnnnnnnnnnnnnnnnnnnnnnnnnnnnnnnnnnnnnnnnnnnnnnnnnnnnnnnnnnnnnnnnnnnnnnnnnnnnnnnnnnnnnnnnnnnnnnnnnnnnnnnnnnnnnnnnnnnnnnnnnnnnnnnnnnnnnnnnnnnnnnnnnnnnnnnnnnnnnnnnnnnnnnnnnnnnnnnnnnnnnnnnnnnnnnnnnnnnnnnnnnnnnnnnnnnnnnnnnnnnnnnnnnnnnnnnnnnnnnnnnnnnnnnnnnnnnnnnnnnnnnnnnnnnnnnnnnnnnnnnnnnnnnnnnnnnnnnnnnnnnnnnnnnnnnnnnnnnnnnnnnnnnnnnnnnnnnnnnnnnnnnnnnnnnnnnnnnnnnnnnnnnnnnnnnnnnnnnnnnnnnnnnnnnnnnnnnnnnnnnnnnnnnnnnnnnnnnnnnnnnnnnnnnnnnnnnnnnnnnnnnnnnnnnnnnnnnnnnnnnnnnnnnnnnnnnnnnnnnnnnnnnnnnnnnnnnnnnnnnnnnnnnnnnnnnnnnnnnnnnnnnnnnnnnnnnnnnnnnnnnnnnnnnnnnnnnnnnnnnnnnnnnnnnnnnnnnnnnnnnnnnnnnnnnnnnnnnnnnnnnnnnnnnnnnnnnnnnnnnnnnnnnnnnnnnnnnnnnnnnnnnnnnnnnnnnnnnnnnnnnnnnnnnnnnnnnnnnnnnnnnnnnnnnnnnnnnnnnnnnnnnnnnnnnnnnnnnnnnnnnnnnnnnnnnnnnnnnnnnnnnnnnnnnnnnnnnnnnnnnnnnnnnnnnnnnnnnnnnnnnnnnnnnnnnnnnnnnnnnnnnnnnnnnnnnnnnnnnnnnnnnnnnnnnnnnnnnnnnnnnnnnnnnnnnnnnnnnnnnnnnnnnnnnnnnnnnnnnnnnnnnnnnnnnnnnnnnnnnnnnnnnnnnnnnnnnnnnnnnnnnnnnnnnnnnnnnnnnnnnnnnnnnnnnnnnnnnnnnnnnnnnnnnnnnnnnnnnnnnnnnnnnnnnnnnnnnnnnnnnnnnnnnnnnnnnnnnnnnnnnnnnnnnnnnnnnnnnnnnnnnnnnnnnnnnnnnnnnnnnnnnnnnnnnnnnnnnnnnnnnnnnnnnnnnnnnnnnnnnnnnnnnnnnnnnnnnnnnnnnnnnnnnnnnnnnnnnnnnnnnnnnnnnnnnnnnnnnnnnnnnnnnnnnnnnnnnnnnnnnnnnnnnnnnnnnnnnnnnnnnnnnnnnnnnnnnnnnnnnnnnnnnnnnnnnnnnnnnnnnnnnnnnnnnnnnnnnnnnnnnnnnnnnnnnnnnnnnnnnnnnnnnnnnnnnnnnnnnnnnnnnnnnnnnnnnnnnnnnnnnnnnnnnnnnnnnnnnnnnnnnnnnnnnnnnnnnnnnnnnnnnnnnnnnnnnnnnnnnnnnnnnnnnnnnnnnnnnnnnnnnnnnnnnnnnnnnnnnnnnnnnnnnnnnnnnnnnnnnnnnnnnnnnnnnnnnnnnnnnnnnnnnnnnnnnnnnnnnnnnnnnnnnnnnnnnnnnnnnnnnnnnnnnnnnnnnnnnnnnnnnnnnnnnnnnnnnnnnnnnnnnnnnnnnnnnnnnnnnnnnnnnnnnnnnnnnnnnnnnnnnnnnnnnnnnnnnnnnnnnnnnnnnnnnnnnnnnnnnnnnnnnnnnnnnnnnnnnnnnnnnnnnnnnnnnnnnnnnnnnnnnnnnnnnnnnnnnnnnnnnnnnnnnnnnnnnnnnnnnnnnnnnnnnnnnnnnnnnnnnnnnnnnnnnnnnnnnnnnnnnnnnnnnnnnnnnnnnnnnnnnnnnnnnnnnnnnnnnnnnnnnnnnnnnnnnnnnnnnnnnnnnnnnnnnnnnnnnnnnnnnnnnnnnnnnnnnnnnnnnnnnnnnnnnnnnnnnnnnnnnnnnnnnnnnnnnnnnnnnnnnnnnnnnnnnnnnnnnnnnnnnnnnnnnnnnnnnnnnnnnnnnnnnnnnnnnnnnnnnnnnnnnnnnnnnnnnnnnnnnnnnnnnnnnnnnnnnnnnnnnnnnnnnnnnnnnnnnnnnnnnnnnnnnnnnnnnnnnnnnnnnnnnnnnnnnnnnnnnnnnnnnnnnnnnnnnnnnnnnnnnnnnnnnnnnnnnnnnnnnnnnnnnnnnnnnnnnnnnnnnnnnnnnnnnnnnnnnnnnnnnnnnnnnnnnnnnnnnnnnnnnnnnnnnnnnnnnnnnnnnnnnnnnnnnnnnnnnnnnnnnnnnnnnnnnnnnnnnnnnnnnnnnnnnnnnnnnnnnnnnnnnnnnnnnnnnnnnnnnnnnnnnnnnnnnnnnnnnnnnnnnnnnnnnnnnnnnnnnnnnnnnnnnnnnnnnnnnnnnnnnnnnnnnnnnnnnnnnnnnnnnnnnnnnnnnnnnnnnnnnnnnnnnnnnnnnnnnnnnnnnnnnnnnnnnnnnnnnnnnnnnnnnnnnnnnnnnnnnnnnnnnnnnnnnnnnnnnnnnnnnnnnnnnnnnnnnnnnnnnnnnnnnnnnnnnnnnnnnnnnnnnnnnnnnnnnnnnnnnnnnnnnnnnnnnnnnnnnnnnnnnnnnnnnnnnnnnnnnnnnnnnnnnnnnnnnnnnnnnnnnnnnnnnnnnnnnnnnnnnnnnnnnnnnnnnnnnnnnnnnnnnnnnnnnnnnnnnnnnnnnnnnnnnnnnnnnnnnnnnnnnnnnnnnnnnnnnnnnnnnnnnnnnnnnnnnnnnnnnnnnnnnnnnnnnnnnnnnnnnnnnnnnnnnnnnnnnnnnnnnnnnnnnnnnnnnnnnnnnnnnnnnnnnnnnnnnnnnnnnnnnnnnnnnnnnnnnnnnnnnnnnnnnnnnnnnnnnnnnnnnnnnnnnnnnnnnnnnnnnnnnnnnnnnnnnnnnnnnnnnnnnnnnnnnnnnnnnnnnnnnnnnnnnnnnnnnnnnnnnnnnnnnnnnnnnnnnnnnnnnnnnnnnnnnnnnnnnnnnnnnnnnnnnnnnnnnnnnnnnnnnnnnnnnnnnnnnnnnnnnnnnnnnnnnnnnnnnnnnnnnnnnnnnnnnnnnnnnnnnnnnnnnnnnnnnnnnnnnnnnnnnnnnnnnnnnnnnnnnnnnnnnnnnnnnnnnnnnnnnnnnnnnnnnnnnnnnnnnnnnnnnnnnnnnnnnnnnnnnnnnnnnnnnnnnnnnnnnnnnnnnnnnnnnnnnnnnnnnnnnnnnnnnnnnnnnnnnnnnnnnnnnnnnnnnnnnnnnnnnnnnnnnnnnnnnnnnnnnnnnnnnnnnnnnnnnnnnnnnnnnnnnnnnnnnnnnnnnnnnnnnnnnnnnnnnnnnnnnnnnnnnnnnnnnnnnnnnnnnnnnnnnnnnnnnnnnnnnnnnnnnnnnnnnnnnnnnnnnnnnnnnnnnnnnnnnnnnnnnnnnnnnnnnnnnnnnnnnnnnnnnnnnnnnnnnnnnnnnnnnnnnnnnnnnnnnnnnnnnnnnnnnnnnnnnnnnnnnnnnnnnnnnnnnnnnnnnnnnnnnnnnnnnnnnnnnnnnnnnnnnnnnnnnnnnnnnnnnnnnnnnnnnnnnnnnnnnnnnnnnnnnnnnnnnnnnnnnnnnnnnnnnnnnnnnnnnnnnnnnnnnnnnnnnnnnnnnnnnnnnnnnnnnnnnnnnnnnnnnnnnnnnnnnnnnnnnnnnnnnnnnnnnnnnnnnnnnnnnnnnnnnnnnnnnnnnnnnnnnnnnnnnnnnnnnnnnnnnnnnnnnnnnnnnnnnnnnnnnnnnnnnnnnnnnnnnnnnnnnnnnnnnnnnnnnnnnnnnnnnnnnnnnnnnnnnnnnnnnnnnnnnnnnnnnnnnnnnnnnnnnnnnnnnnnnnnnnnnnnnnnnnnnnnnnnnnnnnnnnnnnnnnnnnnnnnnnnnnnnnnnnnnnnnnnnnnnnnnnnnnnnnnnnnnnnnnnnnnnnnnnnnnnnnnnnnnnnnnnnnnnnnnnnnnnnnnnnnnnnnnnnnnnnnnnnnnnnnnnnnnnnnnnnnnnnnnnnnnnnnnnnnnnnnnnnnnnnnnnnnnnnnnnnnnnnnnnnnnnnnnnnnnnnnnnnnnnnnnnnnnnnnnnnnnnnnnnnnnnnnnnnnnnnnnnnnnnnnnnnnnnnnnnnnnnnnnnnnnnnnnnnnnnnnnnnnnnnnnnnnnnnnnnnnnnnnnnnnnnnnnnnnnnnnnnnnnnnnnnnnnnnnnnnnnnnnnnnnnnnnnnnnnnnnnnnnnnnnnnnnnnnnnnnnnnnnnnnnnnnnnnnnnnnnnnnnnnnnnnnnnnnnnnnnnnnnnnnnnnnnnnnnnnnnnnnnnnnnnnnnnnnnnnnnnnnnnnnnnnnnnnnnnnnnnnnnnnnnnnnnnnnnnnnnnnnnnnnnnnnnnnnnnnnnnnnnnnnnnnnnnnnnnnnnnnnnnnnnnnnnnnnnnnnnnnnnnnnnnnnnnnnnnnnnnnnnnnnnnnnnnnnnnnnnnnnnnnnnnnnnnnnnnnnnnnnnnnnnnnnnnnnnnnnnnnnnnnnnnnnnnnnnnnnnnnnnnnnnnnnnnnnnnnnnnnnnnnnnnnnnnnnnnnnnnnnnnnnnnnnnnnnnnnnnnnnnnnnnnnnnnnnnnnnnnnnnnnnnnnnnnnnnnnnnnnnnnnnnnnnnnnnnnnnnnnnnnnnnnnnnnnnnnnnnnnnnnnnnnnnnnnnnnnnnnnnnnnnnnnnnnnnnnnnnnnnnnnnnnnnnnnnnnnnnnnnnnnnnnnnnnnnnnnnnnnnnnnnnnnnnnnnnnnnnnnnnnnnnnnnnnnnnnnnnnnnnnnnnnnnnnnnnnnnnnnnnnnnnnnnnnnnnnnnnnnnnnnnnnnnnnnnnnnnnnnnnnnnnnnnnnnnnnnnnnnnnnnnnnnnnnnnnnnnnnnnnnnnnnnnnnnnnnnnnnnnnnnnnnnnnnnnnnnnnnnnnnnnnnnnnnnnnnnnnnnnnnnnnnnnnnnnnnnnnnnnnnnnnnnnnnnnnnnnnnnnnnnnnnnnnnnnnnnnnnnnnnnnnnnnnnnnnnnnnnnnnnnnnnnnnnnnnnnnnnnnnnnnnnnnnnnnnnnnnnnnnnnnnnnnnnnnnnnnnnnnnnnnnnnnnnnnnnnnnnnnnnnnnnnnnnnnnnnnnnnnnnnnnnnnnnnnnnnnnnnnnnnnnnnnnnnnnnnnnnnnnnnnnnnnnnnnnnnnnnnnnnnnnnnnnnnnnnnnnnnnnnnnnnnnnnnnnnnnnnnnnnnnnnnnnnnnnnnnnnnnnnnnnnnnnnnnnnnnnnnnnnnnnnnnnnnnnnnnnnnnnnnnnnnnnnnnnnnnnnnnnnnnnnnnnnnnnnnnnnnnnnnnnnnnnnnnnnnnnnnnnnnnnnnnnnnnnnnnnnnnnnnnnnnnnnnnnnnnnnnnnnnnnnnnnnnnnnnnnnnnnnnnnnnnnnnnnnnnnnnnnnnnnnnnnnnnnnnnnnnnnnnnnnnnnnnnnnnnnnnnnnnnnnnnnnnnnnnnnnnnnnnnnnnnnnnnnnnnnnnnnnnnnnnnnnnnnnnnnnnnnnnnnnnnnnnnnnnnnnnnnnnnnnnnnnnnnnnnnnnnnnnnnnnnnnnnnnnnnnnnnnnnnnnnnnnnnnnnnnnnnnnnnnnnnnnnnnnnnnnnnnnnnnnnnnnnnnnnnnnnnnnnnnnnnnnnnnnnnnnnnnnnnnnnnnnnnnnnnnnnnnnnnnnnnnnnnnnnnnnnnnnnnnnnnnnnnnnnnnnnnnnnnnnnnnnnnnnnnnnnnnnnnnnnnnnnnnnnnnnnnnnnnnnnnnnnnnnnnnnnnnnnnnnnnnnnnnnnnnnnnnnnnnnnnnnnnnnnnnnnnnnnnnnnnnnnnnnnnnnnnnnnnnnnnnnnnnnnnnnnnnnnnnnnnnnnnnnnnnnnnnnnnnnnnnnnnnnnnnnnnnnnnnnnnnnnnnnnnnnnnnnnnnnnnnnnnnnnnnnnnnnnnnnnnnnnnnnnnnnnnnnnnnnnnnnnnnnnnnnnnnnnnnnnnnnnnnnnnnnnnnnnnnnnnnnnnnnnnnnnnnnnnnnnnnnnnnnnnnnnnnnnnnnnnnnnnnnnnnnnnnnnnnnnnnnnnnnnnnnnnnnnnnnnnnnnnnnnnnnnnnnnnnnnnnnnnnnnnnnnnnnnnnnnnnnnnnnnnnnnnnnnnnnnnnnnnnnnnnnnnnnnnnnnnnnnnnnnnnnnnnnnnnnnnnnnnnnnnnnnnnnnnnnnnnnnnnnnnnnnnnnnnnnnnnnnnnnnnnnnnnnnnnnnnnnnnnnnnnnnnnnnnnnnnnnnnnnnnnnnnnnnnnnnnnnnnnnnnnnnnnnnnnnnnnnnnnnnnnnnnnnnnnnnnnnnnnnnnnnnnnnnnnnnnnnnnnnnnnnnnnnnnnnnnnnnnnnnnnnnnnnnnnnnnnnnnnnnnnnnnnnnnnnnnnnnnnnnnnnnnnnnnnnnnnnnnnnnnnnnnnnnnnnnnnnnnnnnnnnnnnnnnnnnnnnnnnnnnnnnnnnnnnnnnnnnnnnnnnnnnnnnnnnnnnnnnnnnnnnnnnnnnnnnnnnnnnnnnnnnnnnnnnnnnnnnnnnnnnnnnnnnnnnnnnnnnnnnnnnnnnnnnnnnnnnnnnnnnnnnnnnnnnnnnnnnnnnnnnnnnnnnnnnnnnnnnnnnnnnnnnnnnnnnnnnnnnnnnnnnnnnnnnnnnnnnnnnnnnnnnnnnnnnnnnnnnnnnnnnnnnnnnnnnnnnnnnnnnnnnnnnnnnnnnnnnnnnnnnnnnnnnnnnnnnnnnnnnnnnnnnnnnnnnnnnnnnnnnnnnnnnnnnnnnnnnnnnnnnnnnnnnnnnnnnnnnnnnnnnnnnnnnnnnnnnnnnnnnnnnnnnnnnnnnnnnnnnnnnnnnnnnnnnnnnnnnnnnnnnnnnnnnnnnnnnnnnnnnnnnnnnnnnnnnnnnnnnnnnnnnnnnnnnnnnnnnnnnnnnnnnnnnnnnnnnnnnnnnnnnnnnnnnnnnnnnnnnnnnnnnnnnnnnnnnnnnnnnnnnnnnnnnnnnnnnnnnnnnnnnnnnnnnnnnnnnnnnnnnnnnnnnnnnnnnnnnnnnnnnnnnnnnnnnnnnnnnnnnnnnnnnnnnnnnnnnnnnnnnnnnnnnnnnnnnnnnnnnnnnnnnnnnnnnnnnnnnnnnnnnnnnnnnnnnnnnnnnnnnnnnnnnnnnnnnnnnnnnnnnnnnnnnnnnnnnnnnnnnnnnnnnnnnnnnnnnnnnnnnnnnnnnnnnnnnnnnnnnnnnnnnnnnnnnnnnnnnnnnnnnnnnnnnnnnnnnnnnnnnnnnnnnnnnnnnnnnnnnnnnnnnnnnnnnnnnnnnnnnnnnnnnnnnnnnnnnnnnnnnnnnnnnnnnnnnnnnnnnnnnnnnnnnnnnnnnnnnnnnnnnnnnnnnnnnnnnnnnnnnnnnnnnnnnnnnnnnnnnnnnnnnnnnnnnnnnnnnnnnnnnnnnnnnnnnnnnnnnnnnnnnnnnnnnnnnnnnnnnnnnnnnnnnnnnnnnnnnnnnnnnnnnnnnnnnnnnnnnnnnnnnnnnnnnnnnnnnnnnnnnnnnnnnnnnnnnnnnnnnnnnnnnnnnnnnnnnnnnnnnnnnnnnnnnnnnnnnnnnnnnnnnnnnnnnnnnnnnnnnnnnnnnnnnnnnnnnnnnnnnnnnnnnnnnnnnnnnnnnnnnnnnnnnnnnnnnnnnnnnnnnnnnnnnnnnnnnnnnnnnnnnnnnnnnnnnnnnnnnnnnnnnnnnnnnnnnnnnnnnnnnnnnnnnnnnnnnnnnnnnnnnnnnnnnnnnnnnnnnnnnnnnnnnnnnnnnnnnnnnnnnnnnnnnnnnnnnnnnnnnnnnnnnnnnnnnnnnnnnnnnnnnnnnnnnnnnnnnnnnnnnnnnnnnnnnnnnnnnnnnnnnnnnnnnnnnnnnnnnnnnnnnnnnnnnnnnnnnnnnnnnnnnnnnnnnnnnnnnnnnnnnnnnnnnnnnnnnnnnnnnnnnnnnnnnnnnnnnnnnnnnnnnnnnnnnnnnnnnnnnnnnnnnnnnnnnnnnnnnnnnnnnnnnnnnnnnnnnnnnnnnnnnnnnnnnnnnnnnnnnnnnnnnnnnnnnnnnnnnnnnnnnnnnnnnnnnnnnnnnnnnnnnnnnnnnnnnnnnnnnnnnnnnnnnnnnnnnnnnnnnnnnnnnnnnnnnnnnnnnnnnnnnnnnnnnnnnnnnnnnnnnnnnnnnnnnnnnnnnnnnnnnnnnnnnnnnnnnnnnnnnnnnnnnnnnnnnnnnnnnnnnnnnnnnnnnnnnnnnnnnnnnnnnnnnnnnnnnnnnnnnnnnnnnnnnnnnnnnnnnnnnnnnnnnnnnnnnnnnnnnnnnnnnnnnnnnnnnnnnnnnnnnnnnnnnnnnnnnnnnnnnnnnnnnnnnnnnnnnnnnnnnnnnnnnnnnnnnnnnnnnnnnnnnnnnnnnnnnnnnnnnnnnnnnnnnnnnnnnnnnnnnnnnnnnnnnnnnnnnnnnnnnnnnnnnnnnnnnnnnnnnnnnnnnnnnnnnnnnnnnnnnnnnnnnnnnnnnnnnnnnnnnnnnnnnnnnnnnnnnnnnnnnnnnnnnnnnnnnnnnnnnnnnnnnnnnnnnnnnnnnnnnnnnnnnnnnnnnnnnnnnnnnnnnnnnnnnnnnnnnnnnnnnnnnnnnnnnnnnnnnnnnnnnnnnnnnnnnnnnnnnnnnnnnnnnnnnnnnnnnnnnnnnnnnnnnnnnnnnnnnnnnnnnnnnnnnnnnnnnnnnnnnnnnnnnnnnnnnnnnnnnnnnnnnnnnnnnnnnnnnnnnnnnnnnnnnnnnnnnnnnnnnnnnnnnnnnnnnnnnnnnnnnnnnnnnnnnnnnnnnnnnnnnnnnnnnnnnnnnnnnnnnnnnnnnnnnnnnnnnnnnnnnnnnnnnnnnnnnnnnnnnnnnnnnnnnnnnnnnnnnnnnnnnnnnnnnnnnnnnnnnnnnnnnnnnnnnnnnnnnnnnnnnnnnnnnnnnnnnnnnnnnnnnnnnnnnnnnnnnnnnnnnnnnnnnnnnnnnnnnnnnnnnnnnnnnnnnnnnnnnnnnnnnnnnnnnnnnnnnnnnnnnnnnnnnnnnnnnnnnnnnnnnnnnnnnnnnnnnnnnnnnnnnnnnnnnnnnnnnnnnnnnnnnnnnnnnnnnnnnnnnnnnnnnnnnnnnnnnnnnnnnnnnnnnnnnnnnnnnnnnnnnnnnnnnnnnnnnnnnnnnnnnnnnnnnnnnnnnnnnnnnnnnnnnnnnnnnnnnnnnnnnnnnnnnnnnnnnnnnnnnnnnnnnnnnnnnnnnnnnnnnnnnnnnnnnnnnnnnnnnnnnnnnnnnnnnnnnnnnnnnnnnnnnnnnnnnnnnnnnnnnnnnnnnnnnnnnnnnnnnnnnnnnnnnnnnnnnnnnnnnnnnnnnnnnnnnnnnnnnnnnnnnnnnnnnnnnnnnnnnnnnnnnnnnnnnnnnnnnnnnnnnnnnnnnnnnnnnnnnnnnnnnnnnnnnnnnnnnnnnnnnnnnnnnnnnnnnnnnnnnnnnnnnnnnnnnnnnnnnnnnnnnnnnnnnnnnnnnnnnnnnnnnnnnnnnnnnnnnnnnnnnnnnnnnnnnnnnnnnnnnnnnnnnnnnnnnnnnnnnnnnnnnnnnnnnnnnnnnnnnnnnnnnnnnnnnnnnnnnnnnnnnnnnnnnnnnnnnnnnnnnnnnnnnnnnnnnnnnnnnnnnnnnnnnnnnnnnnnnnnnnnnnnnnnnnnnnnnnnnnnnnnnnnnnnnnnnnnnnnnnnnnnnnnnnnnnnnnnnnnnnnnnnnnnnnnnnnnnnnnnnnnnnnnnnnnnnnnnnnnnnnnnnnnnnnnnnnnnnnnnnnnnnnnnnnnnnnnnnnnnnnnnnnnnnnnnnnnnnnnnnnnnnnnnnnnnnnnnnnnnnnnnnnnnnnnnnnnnnnnnnnnnnnnnnnnnnnnnnnnnnnnnnnnnnnnnnnnnnnnnnnnnnnnnnnnnnnnnnnnnnnnnnnnnnnnnnnnnnnnnnnnnnnnnnnnnnnnnnnnnnnnnnnnnnnnnnnnnnnnnnnnnnnnnnnnnnnnnnnnnnnnnnnnnnnnnnnnnnnnnnnnnnnnnnnnnnnnnnnnnnnnnnnnnnnnnnnnnnnnnnnnnnnnnnnnnnnnnnnnnnnnnnnnnnnnnnnnnnnnnnnnnnnnnnnnnnnnnnnnnnnnnnnnnnnnnnnnnnnnnnnnnnnnnnnnnnnnnnnnnnnnnnnnnnnnnnnnnnnnnnnnnnnnnnnnnnnnnnnnnnnnnnnnnnnnnnnnnnnnnnnnnnnnnnnnnnnnnnnnnnnnnnnnnnnnnnnnnnnnnnnnnnnnnnnnnnnnnnnnnnnnnnnnnnnnnnnnnnnnnnnnnnnnnnnnnnnnnnnnnnnnnnnnnnnnnnnnnnnnnnnnnnnnnnnnnnnnnnnnnnnnnnnnnnnnnnnnnnnnnnnnnnnnnnnnnnnnnnnnnnnnnnnnnnnnnnnnnnnnnnnnnnnnnnnnnnnnnnnnnnnnnnnnnnnnnnnnnnnnnnnnnnnnnnnnnnnnnnnnnnnnnnnnnnnnnnnnnnnnnnnnnnnnnnnnnnnnnnnnnnnnnnnnnnnnnnnnnnnnnnnnnnnnnnnnnnnnnnnnnnnnnnnnnnnnnnnnnnnnnnnnnnnnnnnnnnnnnnnnnnnnnnnnnnnnnnnnnnnnnnnnnnnnnnnnnnnnnnnnnnnnnnnnnnnnnnnnnnnnnnnnnnnnnnnnnnnnnnnnnnnnnnnnnnnnnnnnnnnnnnnnnnnnnnnnnnnnnnnnnnnnnnnnnnnnnnnnnnnnnnnnnnnnnnnnnnnnnnnnnnnnnnnnnnnnnnnnnnnnnnnnnnnnnnnnnnnnnnnnnnnnnnnnnnnnnnnnnnnnnnnnnnnnnnnnnnnnnnnnnnnnnnnnnnnnnnnnnnnnnnnnnnnnnnnnnnnnnnnnnnnnnnnnnnnnnnnnnnnnnnnnnnnnnnnnnnnnnnnnnnnnnnnnnnnnnnnnnnnnnnnnnnnnnnnnnnnnnnnnnnnnnnnnnnnnnnnnnnnnnnnnnnnnnnnnnnnnnnnnnnnnnnnnnnnnnnnnnnnnnnnnnnnnnnnnnnnnnnnnnnnnnnnnnnnnnnnnnnnnnnnnnnnnnnnnnnnnnnnnnnnnnnnnnnnnnnnnnnnnnnnnnnnnnnnnnnnnnnnnnnnnnnnnnnnnnnnnnnnnnnnnnnnnnnnnnnnnnnnnnnnnnnnnnnnnnnnnnnnnnnnnnnnnnnnnnnnnnnnnnnnnnnnnnnnnnnnnnnnnnnnnnnnnnnnnnnnnnnnnnnnnnnnnnnnnnnnnnnnnnnnnnnnnnnnnnnnnnnnnnnnnnnnnnnnnnnnnnnnnnnnnnnnnnnnnnnnnnnnnnnnnnnnnnnnnnnnnnnnnnnnnnnnnnnnnnnnnnnnnnnnnnnnnnnnnnnnnnnnnnnnnnnnnnnnnnnnnnnnnnnnnnnnnnnnnnnnnnnnnnnnnnnnnnnnnnnnnnnnnnnnnnnnnnnnnnnnnnnnnnnnnnnnnnnnnnnnnnnnnnnnnnnnnnnnnnnnnnnnnnnnnnnnnnnnnnnnnnnnnnnnnnnnnnnnnnnnnnnnnnnnnnnnnnnnnnnnnnnnnnnnnnnnnnnnnnnnnnnnnnnnnnnnnnnnnnnnnnnnnnnnnnnnnnnnnnnnnnnnnnnnnnnnnnnnnnnnnnnnnnnnnnnnnnnnnnnnnnnnnnnnnnnnnnnnnnnnnnnnnnnnnnnnnnnnnnnnnnnnnnnnnnnnnnnnnnnnnnnnnnnnnnnnnnnnnnnnnnnnnnnnnnnnnnnnnnnnnnnnnnnnnnnnnnnnnnnnnnnnnnnnnnnnnnnnnnnnnnnnnnnnnnnnnnnnnnnnnnnnnnnnnnnnnnnnnnnnnnnnnnnnnnnnnnnnnnnnnnnnnnnnnnnnnnnnnnnnnnnnnnnnnnnnnnnnnnnnnnnnnnnnnnnnnnnnnnnnnnnnnnnnnnnnnnnnnnnnnnnnnnnnnnnnnnnnnnnnnnnnnnnnnnnnnnnnnnnnnnnnnnnnnnnnnnnnnnnnnnnnnnnnnnnnnnnnnnnnnnnnnnnnnnnnnnnnnnnnnnnnnnnnnnnnnnnnnnnnnnnnnnnnnnnnnnnnnnnnnnnnnnnnnnnnnnnnnnnnnnnnnnnnnnnnnnnnnnnnnnnnnnnnnnnnnnnnnnnnnnnnnnnnnnnnnnnnnnnnnnnnnnnnnnnnnnnnnnnnnnnnnnnnnnnnnnnnnnnnnnnnnnnnnnnnnnnnnnnnnnnnnnnnnnnnnnnnnnnnnnnnnnnnnnnnnnnnnnnnnnnnnnnnnnnnnnnnnnnnnnnnnnnnnnnnnnnnnnnnnnnnnnnnnnnnnnnnnnnnnnnnnnnnnnnnnnnnnnnnnnnnnnnnnnnnnnnnnnnnnnnnnnnnnnnnnnnnnnnnnnnnnnnnnnnnnnnnnnnnnnnnnnnnnnnnnnnnnnnnnnnnnnnnnnnnnnnnnnnnnnnnnnnnnnnnnnnnnnnnnnnnnnnnnnnnnnnnnnnnnnnnnnnnnnnnnnnnnnnnnnnnnnnnnnnnnnnnnnnnnnnnnnnnnnnnnnnnnnnnnnnnnnnnnnnnnnnnnnnnnnnnnnnnnnnnnnnnnnnnnnnnnnnnnnnnnnnnnnnnnnnnnnnnnnnnnnnnnnnnnnnnnnnnnnnnnnnnnnnnnnnnnnnnnnnnnnnnnnnnnnnnnnnnnnnnnnnnnnnnnnnnnnnnnnnnnnnnnnnnnnnnnnnnnnnnnnnnnnnnnnnnnnnnnnnnnnnnnnnnnnnnnnnnnnnnnnnnnnnnnnnnnnnnnnnnnnnnnnnnnnnnnnnnnnnnnnnnnnnnnnnnnnnnnnnnnnnnnnnnnnnnnnnnnnnnnnnnnnnnnnnnnnnnnnnnnnnnnnnnnnnnnnnnnnnnnnnnnnnnnnnnnnnnnnnnnnnnnnnnnnnnnnnnnnnnnnnnnnnnnnnnnnnnnnnnnnnnnnnnnnnnnnnnnnnnnnnnnnnnnnnnnnnnnnnnnnnnnnnnnnnnnnnnnnnnnnnnnnnnnnnnnnnnnnnnnnnnnnnnnnnnnnnnnnnnnnnnnnnnnnnnnnnnnnnnnnnnnnnnnnnnnnnnnnnnnnnnnnnnnnnnnnnnnnnnnnnnnnnnnnnnnnnnnnnnnnnnnnnnnnnnnnnnnnnnnnnnnnnnnnnnnnnnnnnnnnnnnnnnnnnnnnnnnnnnnnnnnnnnnnnnnnnnnnnnnnnnnnnnnnnnnnnnnnnnnnnnnnnnnnnnnnnnnnnnnnnnnnnnnnnnnnnnnnnnnnnnnnnnnnnnnnnnnnnnnnnnnnnnnnnnnnnnnnnnnnnnnnnnnnnnnnnnnnnnnnnnnnnnnnnnnnnnnnnnnnnnnnnnnnnnnnnnnnnnnnnnnnnnnnnnnnnnnnnnnnnnnnnnnnnnnnnnnnnnnnnnnnnnnnnnnnnnnnnnnnnnnnnnnnnnnnnnnnnnnnnnnnnnnnnnnnnnnnnnnnnnnnnnnnnnnnnnnnnnnnnnnnnnnnnnnnnnnnnnnnnnnnnnnnnnnnnnnnnnnnnnnnnnnnnnnnnnnnnnnnnnnnnnnnnnnnnnnnnnnnnnnnnnnnnnnnnnnnnnnnnnnnnnnnnnnnnnnnnnnnnnnnnnnnnnnnnnnnnnnnnnnnnnnnnnnnnnnnnnnnnnnnnnnnnnnnnnnnnnnnnnnnnnnnnnnnnnnnnnnnnnnnnnnnnnnnnnnnnnnnnnnnnnnnnnnnnnnnnnnnnnnnnnnnnnnnnnnnnnnnnnnnnnnnnnnnnnnnnnnnnnnnnnnnnnnnnnnnnnnnnnnnnnnnnnnnnnnnnnnnnnnnnnnnnnnnnnnnnnnnnnnnnnnnnnnnnnnnnnnnnnnnnnnnnnnnnnnnnnnnnnnnnnnnnnnnnnnnnnnnnnnnnnnnnnnnnnnnnnnnnnnnnnnnnnnnnnnnnnnnnnnnnnnnnnnnnnnnnnnnnnnnnnnnnnnnnnnnnnnnnnnnnnnnnnnnnnnnnnnnnnnnnnnnnnnnnnnnnnnnnnnnnnnnnnnnnnnnnnnnnnnnnnnnnnnnnnnnnnnnnnnnnnnnnnnnnnnnnnnnnnnnnnnnnnnnnnnnnnnnnnnnnnnnnnnnnnnnnnnnnnnnnnnnnnnnnnnnnnnnnnnnnnnnnnnnnnnnnnnnnnnnnnnnnnnnnnnnnnnnnnnnnnnnnnnnnnnnnnnnnnnnnnnnnnnnnnnnnnnnnnnnnnnnnnnnnnnnnnnnnnnnnnnnnnnnnnnnnnnnnnnnnnnnnnnnnnnnnnnnnnnnnnnnnnnnnnnnnnnnnnnnnnnnnnnnnnnnnnnnnnnnnnnnnnnnnnnnnnnnnnnnnnnnnnnnnnnnnnnnnnnnnnnnnnnnnnnnnnnnnnnnnnnnnnnnnnnnnnnnnnnnnnnnnnnnnnnnnnnnnnnnnnnnnnnnnnnnnnnnnnnnnnnnnnnnnnnnnnnnnnnnnnnnnnnnnnnnnnnnnnnnnnnnnnnnnnnnnnnnnnnnnnnnnnnnnnnnnnnnnnnnnnnnnnnnnnnnnnnnnnnnnnnnnnnnnnnnnnnnnnnnnnnnnnnnnnnnnnnnnnnnnnnnnnnnnnnnnnnnnnnnnnnnnnnnnnnnnnnnnnnnnnnnnnnnnnnnnnnnnnnnnnnnnnnnnnnnnnnnnnnnnnnnnnnnnnnnnnnnnnnnnnnnnnnnnnnnnnnnnnnnnnnnnnnnnnnnnnnnnnnnnnnnnnnnnnnnnnnnnnnnnnnnnnnnnnnnnnnnnnnnnnnnnnnnnnnnnnnnnnnnnnnnnnnnnnnnnnnnnnnnnnnnnnnnnnnnnnnnnnnnnnnnnnnnnnnnnnnnnnnnnnnnnnnnnnnnnnnnnnnnnnnnnnnnnnnnnnnnnnnnnnnnnnnnnnnnnnnnnnnnnnnnnnnnnnnnnnnnnnnnnnnnnnnnnnnnnnnnnnnnnnnnnnnnnnnnnnnnnnnnnnnnnnnnnnnnnnnnnnnnnnnnnnnnnnnnnnnnnnnnnnnnnnnnnnnnnnnnnnnnnnnnnnnnnnnnnnnnnnnnnnnnnnnnnnnnnnnnnnnnnnnnnnnnnnnnnnnnnnnnnnnnnnnnnnnnnnnnnnnnnnnnnnnnnnnnnnnnnnnnnnnnnnnnnnnnnnnnnnnnnnnnnnnnnnnnnnnnnnnnnnnnnnnnnnnnnnnnnnnnnnnnnnnnnnnnnnnnnnnnnnnnnnnnnnnnnnnnnnnnnnnnnnnnnnnnnnnnnnnnnnnnnnnnnnnnnnnnnnnnnnnnnnnnnnnnnnnnnnnnnnnnnnnnnnnnnnnnnnnnnnnnnnnnnnnnnnnnnnnnnnnnnnnnnnnnnnnnnnnnnnnnnnnnnnnnnnnnnnnnnnnnnnnnnnnnnnnnnnnnnnnnnnnnnnnnnnnnnnnnnnnnnnnnnnnnnnnnnnnnnnnnnnnnnnnnnnnnnnnnnnnnnnnnnnnnnnnnnnnnnnnnnnnnnnnnnnnnnnnnnnnnnnnnnnnnnnnnnnnnnnnnnnnnnnnnnnnnnnnnnnnnnnnnnnnnnnnnnnnnnnnnnnnnnnnnnnnnnnnnnnnnnnnnnnnnnnnnnnnnnnnnnnnnnnnnnnnnnnnnnnnnnnnnnnnnnnnnnnnnnnnnnnnnnnnnnnnnnnnnnnnnnnnnnnnnnnnnnnnnnnnnnnnnnnnnnnnnnnnnnnnnnnnnnnnnnnnnnnnnnnnnnnnnnnnnnnnnnnnnnnnnnnnnnnnnnnnnnnnnnnnnnnnnnnnnnnnnnnnnnnnnnnnnnnnnnnnnnnnnnnnnnnnnnnnnnnnnnnnnnnnnnnnnnnnnnnnnnnnnnnnnnnnnnnnnnnnnnnnnnnnnnnnnnnnnnnnnnnnnnnnnnnnnnnnnnnnnnnnnnnnnnnnnnnnnnnnnnnnnnnnnnnnnnnnnnnnnnnnnnnnnnnnnnnnnnnnnnnnnnnnnnnnnnnnnnnnnnnnnnnnnnnnnnnnnnnnnnnnnnnnnnnnnnnnnnnnnnnnnnnnnnnnnnnnnnnnnnnnnnnnnnnnnnnnnnnnnnnnnnnnnnnnnnnnnnnnnnnnnnnnnnnnnnnnnnnnnnnnnnnnnnnnnnnnnnnnnnnnnnnnnnnnnnnnnnnnnnnnnnnnnnnnnnnnnnnnnnnnnnnnnnnnnnnnnnnnnnnnnnnnnnnnnnnnnnnnnnnnnnnnnnnnnnnnnnnnnnnnnnnnnnnnnnnnnnnnnnnnnnnnnnnnnnnnnnnnnnnnnnnnnnnnnnnnnnnnnnnnnnnnnnnnnnnnnnnnnnnnnnnnnnnnnnnnnnnnnnnnnnnnnnnnnnnnnnnnnnnnnnnnnnnnnnnnnnnnnnnnnnnnnnnnnnnnnnnnnnnnnnnnnnnnnnnnnnnnnnnnnnnnnnnnnnnnnnnnnnnnnnnnnnnnnnnnnnnnnnnnnnnnnnnnnnnnnnnnnnnnnnnnnnnnnnnnnnnnnnnnnnnnnnnnnnnnnnnnnnnnnnnnnnnnnnnnnnnnnnnnnnnnnnnnnnnnnnnnnnnnnnnnnnnnnnnnnnnnnnnnnnnnnnnnnnnnnnnnnnnnnnnnnnnnnnnnnnnnnnnnnnnnnnnnnnnnnnnnnnnnnnnnnnnnnnnnnnnnnnnnnnnnnnnnnnnnnnnnnnnnnnnnnnnnnnnnnnnnnnnnnnnnnnnnnnnnnnnnnnnnnnnnnnnnnnnnnnnnnnnnnnnnnnnnnnnnnnnnnnnnnnnnnnnnnnnnnnnnnnnnnnnnnnnnnnnnnnnnnnnnnnnnnnnnnnnnnnnnnnnnnnnnnnnnnnnnnnnnnnnnnnnnnnnnnnnnnnnnnnnnnnnnnnnnnnnnnnnnnnnnnnnnnnnnnnnnnnnnnnnnnnnnnnnnnnnnnnnnnnnnnnnnnnnnnnnnnnnnnnnnnnnnnnnnnnnnnnnnnnnnnnnnnnnnnnnnnnnnnnnnnnnnnnnnnnnnnnnnnnnnnnnnnnnnnnnnnnnnnnnnnnnnnnnnnnnnnnnnnnnnnnnnnnnnnnnnnnnnnnnnnnnnnnnnnnnnnnnnnnnnnnnnnnnnnnnnnnnnnnnnnnnnnnnnnnnnnnnnnnnnnnnnnnnnnnnnnnnnnnnnnnnnnnnnnnnnnnnnnnnnnnnnnnnnnnnnnnnnnnnnnnnnnnnnnnnnnnnnnnnnnnnnnnnnnnnnnnnnnnnnnnnnnnnnnnnnnnnnnnnnnnnnnnnnnnnnnnnnnnnnnnnnnnnnnnnnnnnnnnnnnnnnnnnnnnnnnnnnnnnnnnnnnnnnnnnnnnnnnnnnnnnnnnnnnnnnnnnnnnnnnnnnnnnnnnnnnnnnnnnnnnnnnnnnnnnnnnnnnnnnnnnnnnnnnnnnnnnnnnnnnnnnnnnnnnnnnnnnnnnnnnnnnnnnnnnnnnnnnnnnnnnnnnnnnnnnnnnnnnnnnnnnnnnnnnnnnnnnnnnnnnnnnnnnnnnnnnnnnnnnnnnnnnnnnnnnnnnnnnnnnnnnnnnnnnnnnnnnnnnnnnnnnnnnnnnnnnnnnnnnnnnnnnnnnnnnnnnnnnnnnnnnnnnnnnnnnnnnnnnnnnnnnnnnnnnnnnnnnnnnnnnnnnnnnnnnnnnnnnnnnnnnnnnnnnnnnnnnnnnnnnnnnnnnnnnnnnnnnnnnnnnnnnnnnnnnnnnnnnnnnnnnnnnnnnnnnnnnnnnnnnnnnnnnnnnnnnnnnnnnnnnnnnnnnnnnnnnnnnnnnnnnnnnnnnnnnnnnnnnnnnnnnnnnnnnnnnnnnnnnnnnnnnnnnnnnnnnnnnnnnnnnnnnnnnnnnnnnnnnnnnnnnnnnnnnnnnnnnnnnnnnnnnnnnnnnnnnnnnnnnnnnnnnnnnnnnnnnnnnnnnnnnnnnnnnnnnnnnnnnnnnnnnnnnnnnnnnnnnnnnnnnnnnnnnnnnnnnnnnnnnnnnnnnnnnnnnnnnnnnnnnnnnnnnnnnnnnnnnnnnnnnnnnnnnnnnnnnnnnnnnnnnnnnnnnnnnnnnnnnnnnnnnnnnnnnnnnnnnnnnnnnnnnnnnnnnnnnnnnnnnnnnnnnnnnnnnnnnnnnnnnnnnnnnnnnnnnnnnnnnnnnnnnnnnnnnnnnnnnnnnnnnnnnnnnnnnnnnnnnnnnnnnnnnnnnnnnnnnnnnnnnnnnnnnnnnnnnnnnnnnnnnnnnnnnnnnnnnnnnnnnnnnnnnnnnnnnnnnnnnnnnnnnnnnnnnnnnnnnnnnnnnnnnnnnnnnnnnnnnnnnnnnnnnnnnnnnnnnnnnnnnnnnnnnnnnnnnnnnnnnnnnnnnnnnnnnnnnnnnnnnnnnnnnnnnnnnnnnnnnnnnnnnnnnnnnnnnnnnnnnnnnnnnnnnnnnnnnnnnnnnnnnnnnnnnnnnnnnnnnnnnnnnnnnnnnnnnnnnnnnnnnnnnnnnnnnnnnnnnnnnnnnnnnnnnnnnnnnnnnnnnnnnnnnnnnnnnnnnnnnnnnnnnnnnnnnnnnnnnnnnnnnnnnnnnnnnnnnnnnnnnnnnnnnnnnnnnnnnnnnnnnnnnnnnnnnnnnnnnnnnnnnnnnnnnnnnnnnnnnnnnnnnnnnnnnnnnnnnnnnnnnnnnnnnnnnnnnnnnnnnnnnnnnnnnnnnnnnnnnnnnnnnnnnnnnnnnnnnnnnnnnnnnnnnnnnnnnnnnnnnnnnnnnnnnnnnnnnnnnnnnnnnnnnnnnnnnnnnnnnnnnnnnnnnnnnnnnnnnnnnnnnnnnnnnnnnnnnnnnnnnnnnnnnnnnnnnnnnnnnnnnnnnnnnnnnnnnnnnnnnnnnnnnnnnnnnnnnnnnnnnnnnnnnnnnnnnnnnnnnnnnnnnnnnnnnnnnnnnnnnnnnnnnnnnnnnnnnnnnnnnnnnnnnnnnnnnnnnnnnnnnnnnnnnnnnnnnnnnnnnnnnnnnnnnnnnnnnnnnnnnnnnnnnnnnnnnnnnnnnnnnnnnnnnnnnnnnnnnnnnnnnnnnnnnnnnnnnnnnnnnnnnnnnnnnnnnnnnnnnnnnnnnnnnnnnnnnnnnnnnnnnnnnnnnnnnnnnnnnnnnnnnnnnnnnnnnnnnnnnnnnnnnnnnnnnnnnnnnnnnnnnnnnnnnnnnnnnnnnnnnnnnnnnnnnnnnnnnnnnnnnnnnnnnnnnnnnnnnnnnnnnnnnnnnnnnnnnnnnnnnnnnnnnnnnnnnnnnnnnnnnnnnnnnnnnnnnnnnnnnnnnnnnnnnnnnnnnnnnnnnnnnnnnnnnnnnnnnnnnnnnnnnnnnnnnnnnnnnnnnnnnnnnnnnnnnnnnnnnnnnnnnnnnnnnnnnnnnnnnnnnnnnnnnnnnnnnnnnnnnnnnnnnnnnnnnnnnnnnnnnnnnnnnnnnnnnnnnnnnnnnnnnnnnnnnnnnnnnnnnnnnnnnnnnnnnnnnnnnnnnnnnnnnnnnnnnnnnnnnnnnnnnnnnnnnnnnnnnnnnnnnnnnnnnnnnnnnnnnnnnnnnnnnnnnnnnnnnnnnnnnnnnnnnnnnnnnnnnnnnnnnnnnnnnnnnnnnnnnnnnnnnnnnnnnnnnnnnnnnnnnnnnnnnnnnnnnnnnnnnnnnnnnnnnnnnnnnnnnnnnnnnnnnnnnnnnnnnnnnnnnnnnnnnnnnnnnnnnnnnnnnnnnnnnnnnnnnnnnnnnnnnnnnnnnnnnnnnnnnnnnnnnnnnnnnnnnnnnnnnnnnnnnnnnnnnnnnnnnnnnnnnnnnnnnnnnnnnnnnnnnnnnnnnnnnnnnnnnnnnnnnnnnnnnnnnnnnnnnnnnnnnnnnnnnnnnnnnnnnnnnnnnnnnnnnnnnnnnnnnnnnnnnnnnnnnnnnnnnnnnnnnnnnnnnnnnnnnnnnnnnnnnnnnnnnnnnnnnnnnnnnnnnnnnnnnnnnnnnnnnnnnnnnnnnnnnnnnnnnnnnnnnnnnnnnnnnnnnnnnnnnnnnnnnnnnnnnnnnnnnnnnnnnnnnnnnnnnnnnnnnnnnnnnnnnnnnnnnnnnnnnnnnnnnnnnnnnnnnnnnnnnnnnnnnnnnnnnnnnnnnnnnnnnnnnnnnnnnnnnnnnnnnnnnnnnnnnnnnnnnnnnnnnnnnnnnnnnnnnnnnnnnnnnnnnnnnnnnnnnnnnnnnnnnnnnnnnnnnnnnnnnnnnnnnnnnnnnnnnnnnnnnnnnnnnnnnnnnnnnnnnnnnnnnnnnnnnnnnnnnnnnnnnnnnnnnnnnnnnnnnnnnnnnnnnnnnnnnnnnnnnnnnnnnnnnnnnnnnnnnnnnnnnnnnnnnnnnnnnnnnnnnnnnnnnnnnnnnnnnnnnnnnnnnnnnnnnnnnnnnnnnnnnnnnnnnnnnnnnnnnnnnnnnnnnnnnnnnnnnnnnnnnnnnnnnnnnnnnnnnnnnnnnnnnnnnnnnnnnnnnnnnnnnnnnnnnnnnnnnnnnnnnnnnnnnnnnnnnnnnnnnnnnnnnnnnnnnnnnnnnnnnnnnnnnnnnnnnnnnnnnnnnnnnnnnnnnnnnnnnnnnnnnnnnnnnnnnnnnnnnnnnnnnnnnnnnnnnnnnnnnnnnnnnnnnnnnnnnnnnnnnnnnnnnnnnnnnnnnnnnnnnnnnnnnnnnnnnnnnnnnnnnnnnnnnnnnnnnnnnnnnnnnnnnnnnnnnnnnnnnnnnnnnnnnnnnnnnnnnnnnnnnnnnnnnnnnnnnnnnnnnnnnnnnnnnnnnnnnnnnnnnnnnnnnnnnnnnnnnnnnnnnnnnnnnnnnnnnnnnnnnnnnnnnnnnnnnnnnnnnnnnnnnnnnnnnnnnnnnnnnnnnnnnnnnnnnnnnnnnnnnnnnnnnnnnnnnnnnnnnnnnnnnnnnnnnnnnnnnnnnnnnnnnnnnnnnnnnnnnnnnnnnnnnnnnnnnnnnnnnnnnnnnnnnnnnnnnnnnnnnnnnnnnnnnnnnnnnnnnnnnnnnnnnnnnnnnnnnnnnnnnnnnnnnnnnnnnnnnnnnnnnnnnnnnnnnnnnnnnnnnnnnnnnnnnnnnnnnnnnnnnnnnnnnnnnnnnnnnnnnnnnnnnnnnnnnnnnnnnnnnnnnnnnnnnnnnnnnnnnnnnnnnnnnnnnnnnnnnnnnnnnnnnnnnnnnnnnnnnnnnnnnnnnnnnnnnnnnnnnnnnnnnnnnnnnnnnnnnnnnnnnnnnnnnnnnnnnnnnnnnnnnnnnnnnnnnnnnnnnnnnnnnnnnnnnnnnnnnnnnnnnnnnnnnnnnnnnnnnnnnnnnnnnnnnnnnnnnnnnnnnnnnnnnnnnnnnnnnnnnnnnnnnnnnnnnnnnnnnnnnnnnnnnnnnnnnnnnnnnnnnnnnnnnnnnnnnnnnnnnnnnnnnnnnnnnnnnnnnnnnnnnnnnnnnnnnnnnnnnnnnnnnnnnnnnnnnnnnnnnnnnnnnnnnnnnnnnnnnnnnnnnnnnnnnnnnnnnnnnnnnnnnnnnnnnnnnnnnnnnnnnnnnnnnnnnnnnnnnnnnnnnnnnnnnnnnnnnnnnnnnnnnnnnnnnnnnnnnnnnnnnnnnnnnnnnnnnnnnnnnnnnnnnnnnnnnnnnnnnnnnnnnnnnnnnnnnnnnnnnnnnnnnnnnnnnnnnnnnnnnnnnnnnnnnnnnnnnnnnnnnnnnnnnnnnnnnnnnnnnnnnnnnnnnnnnnnnnnnnnnnnnnnnnnnnnnnnnnnnnnnnnnnnnnnnnnnnnnnnnnnnnnnnnnnnnnnnnnnnnnnnnnnnnnnnnnnnnnnnnnnnnnnnnnnnnnnnnnnnnnnnnnnnnnnnnnnnnnnnnnnnnnnnnnnnnnnnnnnnnnnnnnnnnnnnnnnnnnnnnnnnnnnnnnnnnnnnnnnnnnnnnnnnnnnnnnnnnnnnnnnnnnnnnnnnnnnnnnnnnnnnnnnnnnnnnnnnnnnnnnnnnnnnnnnnnnnnnnnnnnnnnnnnnnnnnnnnnnnnnnnnnnnnnnnnnnnnnnnnnnnnnnnnnnnnnnnnnnnnnnnnnnnnnnnnnnnnnnnnnnnnnnnnnnnnnnnnnnnnnnnnnnnnnnnnnnnnnnnnnnnnnnnnnnnnnnnnnnnnnnnnnnnnnnnnnnnnnnnnnnnnnnnnnnnnnnnnnnnnnnnnnnnnnnnnnnnnnnnnnnnnnnnnnnnnnnnnnnnnnnnnnnnnnnnnnnnnnnnnnnnnnnnnnnnnnnnnnnnnnnnnnnnnnnnnnnnnnnnnnnnnnnnnnnnnnnnnnnnnnnnnnnnnnnnnnnnnnnnnnnnnnnnnnnnnnnnnnnnnnnnnnnnnnnnnnnnnnnnnnnnnnnnnnnnnnnnnnnnnnnnnnnnnnnnnnnnnnnnnnnnnnnnnnnnnnnnnnnnnnnnnnnnnnnnnnnnnnnnnnnnnnnnnnnnnnnnnnnnnnnnnnnnnnnnnnnnnnnnnnnnnnnnnnnnnnnnnnnnnnnnnnnnnnnnnnnnnnnnnnnnnnnnnnnnnnnnnnnnnnnnnnnnnnnnnnnnnnnnnnnnnnnnnnnnnnnnnnnnnnnnnnnnnnnnnnnnnnnnnnnnnnnnnnnnnnnnnnnnnnnnnnnnnnnnnnnnnnnnnnnnnnnnnnnnnnnnnnnnnnnnnnnnnnnnnnnnnnnnnnnnnnnnnnnnnnnnnnnnnnnnnnnnnnnnnnnnnnnnnnnnnnnnnnnnnnnnnnnnnnnnnnnnnnnnnnnnnnnnnnnnnnnnnnnnnnnnnnnnnnnnnnnnnnnnnnnnnnnnnnnnnnnnnnnnnnnnnnnnnnnnnnnnnnnnnnnnnnnnnnnnnnnnnnnnnnnnnnnnnnnnnnnnnnnnnnnnnnnnnnnnnnnnnnnnnnnnnnnnnnnnnnnnnnnnnnnnnnnnnnnnnnnnnnnnnnnnnnnnnnnnnnnnnnnnnnnnnnnnnnnnnnnnnnnnnnnnnnnnnnnnnnnnnnnnnnnnnnnnnnnnnnnnnnnnnnnnnnnnnnnnnnnnnnnnnnnnnnnnnnnnnnnnnnnnnnnnnnnnnnnnnnnnnnnnnnnnnnnnnnnnnnnnnnnnnnnnnnnnnnnnnnnnnnnnnnnnnnnnnnnnnnnnnnnnnnnnnnnnnnnnnnnnnnnnnnnnnnnnnnnnnnnnnnnnnnnnnnnnnnnnnnnnnnnnnnnnnnnnnnnnnnnnnnnnnnnnnnnnnnnnnnnnnnnnnnnnnnnnnnnnnnnnnnnnnnnnnnnnnnnnnnnnnnnnnnnnnnnnnnnnnnnnnnnnnnnnnnnnnnnnnnnnnnnnnnnnnnnnnnnnnnnnnnnnnnnnnnnnnnnnnnnnnnnnnnnnnnnnnnnnnnnnnnnnnnnnnnnnnnnnnnnnnnnnnnnnnnnnnnnnnnnnnnnnnnnnnnnnnnnnnnnnnnnnnnnnnnnnnnnnnnnnnnnnnnnnnnnnnnnnnnnnnnnnnnnnnnnnnnnnnnnnnnnnnnnnnnnnnnnnnnnnnnnnnnnnnnnnnnnnnnnnnnnnnnnnnnnnnnnnnnnnnnnnnnnnnnnnnnnnnnnnnnnnnnnnnnnnnnnnnnnnnnnnnnnnnnnnnnnnnnnnnnnnnnnnnnnnnnnnnnnnnnnnnnnnnnnnnnnnnnnnnnnnnnnnnnnnnnnnnnnnnnnnnnnnnnnnnnnnnnnnnnnnnnnnnnnnnnnnnnnnnnnnnnnnnnnnnnnnnnnnnnnnnnnnnnnnnnnnnnnnnnnnnnnnnnnnnnnnnnnnnnnnnnnnnnnnnnnnnnnnnnnnnnnnnnnnnnnnnnnnnnnnnnnnnnnnnnnnnnnnnnnnnnnnnnnnnnnnnnnnnnnnnnnnnnnnnnnnnnnnnnnnnnnnnnnnnnnnnnnnnnnnnnnnnnnnnnnnnnnnnnnnnnnnnnnnnnnnnnnnnnnnnnnnnnnnnnnnnnnnnnnnnnnnnnnnnnnnnnnnnnnnnnnnnnnnnnnnnnnnnnnnnnnnnnnnnnnnnnnnnnnnnnnnnnnnnnnnnnnnnnnnnnnnnnnnnnnnnnnnnnnnnnnnnnnnnnnnnnnnnnnnnnnnnnnnnnnnnnnnnnnnnnnnnnnnnnnnnnnnnnnnnnnnnnnnnnnnnnnnnnnnnnnnnnnnnnnnnnnnnnnnnnnnnnnnnnnnnnnnnnnnnnnnnnnnnnnnnnnnnnnnnnnnnnnnnnnnnnnnnnnnnnnnnnnnnnnnnnnnnnnnnnnnnnnnnnnnnnnnnnnnnnnnnnnnnnnnnnnnnnnnnnnnnnnnnnnnnnnnnnnnnnnnnnnnnnnnnnnnnnnnnnnnnnnnnnnnnnnnnnnnnnnnnnnnnnnnnnnnnnnnnnnnnnnnnnnnnnnnnnnnnnnnnnnnnnnnnnnnnnnnnnnnnnnnnnnnnnnnnnnnnnnnnnnnnnnnnnnnnnnnnnnnnnnnnnnnnnnnnnnnnnnnnnnnnnnnnnnnnnnnnnnnnnnnnnnnnnnnnnnnnnnnnnnnnnnnnnnnnnnnnnnnnnnnnnnnnnnnnnnnnnnnnnnnnnnnnnnnnnnnnnnnnnnnnnnnnnnnnnnnnnnnnnnnnnnnnnnnnnnnnnnnnnnnnnnnnnnnnnnnnnnnnnnnnnnnnnnnnnnnnnnnnnnnnnnnnnnnnnnnnnnnnnnnnnnnnnnnnnnnnnnnnnnnnnnnnnnnnnnnnnnnnnnnnnnnnnnnnnnnnnnnnnnnnnnnnnnnnnnnnnnnnnnnnnnnnnnnnnnnnnnnnnnnnnnnnnnnnnnnnnnnnnnnnnnnnnnnnnnnnnnnnnnnnnnnnnnnnnnnnnnnnnnnnnnnnnnnnnnnnnnnnnnnnnnnnnnnnnnnnnnnnnnnnnnnnnnnnnnnnnnnnnnnnnnnnnnnnnnnnnnnnnnnnnnnnnnnnnnnnnnnnnnnnnnnnnnnnnnnnnnnnnnnnnnnnnnnnnnnnnnnnnnnnnnnnnnnnnnnnnnnnnnnnnnnnnnnnnnnnnnnnnnnnnnnnnnnnnnnnnnnnnnnnnnnnnnnnnnnnnnnnnnnnnnnnnnnnnnnnnnnnnnnnnnnnnnnnnnnnnnnnnnnnnnnnnnnnnnnnnnnnnnnnnnnnnnnnnnnnnnnnnnnnnnnnnnnnnnnnnnnnnnnnnnnnnnnnnnnnnnnnnnnnnnnnnnnnnnnnnnnnnnnnnnnnnnnnnnnnnnnnnnnnnnnnnnnnnnnnnnnnnnnnnnnnnnnnnnnnnnnnnnnnnnnnnnnnnnnnnnnnnnnnnnnnnnnnnnnnnnnnnnnnnnnnnnnnnnnnnnnnnnnnnnnnnnnnnnnnnnnnnnnnnnnnnnnnnnnnnnnnnnnnnnnnnnnnnnnnnnnnnnnnnnnnnnnnnnnnnnnnnnnnnnnnnnnnnnnnnnnnnnnnnnnnnnnnnnnnnnnnnnnnnnnnnnnnnnnnnnnnnnnnnnnnnnnnnnnnnnnnnnnnnnnnnnnnnnnnnnnnnnnnnnnnnnnnnnnnnnnnnnnnnnnnnnnnnnnnnnnnnnnnnnnnnnnnnnnnnnnnnnnnnnnnnnnnnnnnnnnnnnnnnnnnnnnnnnnnnnnnnnnnnnnnnnnnnnnnnnnnnnnnnnnnnnnnnnnnnnnnnnnnnnnnnnnnnnnnnnnnnnnnnnnnnnnnnnnnnnnnnnnnnnnnnnnnnnnnnnnnnnnnnnnnnnnnnnnnnnnnnnnnnnnnnnnnnnnnnnnnnnnnnnnnnnnnnnnnnnnnnnnnnnnnnnnnnnnnnnnnnnnnnnnnnnnnnnnnnnnnnnnnnnnnnnnnnnnnnnnnnnnnnnnnnnnnnnnnnnnnnnnnnnnnnnnnnnnnnnnnnnnnnnnnnnnnnnnnnnnnnnnnnnnnnnnnnnnnnnnnnnnnnnnnnnnnnnnnnnnnnnnnnnnnnnnnnnnnnnnnnnnnnnnnnnnnnnnnnnnnnnnnnnnnnnnnnnnnnnnnnnnnnnnnnnnnnnnnnnnnnnnnnnnnnnnnnnnnnnnnnnnnnnnnnnnnnnnnnnnnnnnnnnnnnnnnnnnnnnnnnnnnnnnnnnnnnnnnnnnnnnnnnnnnnnnnnnnnnnnnnnnnnnnnnnnnnnnnnnnnnnnnnnnnnnnnnnnnnnnnnnnnnnnnnnnnnnnnnnnnnnnnnnnnnnnnnnnnnnnnnnnnnnnnnnnnnnnnnnnnnnnnnnnnnnnnnnnnnnnnnnnnnnnnnnnnnnnnnnnnnnnnnnnnnnnnnnnnnnnnnnnnnnnnnnnnnnnnnnnnnnnnnnnnnnnnnnnnnnnnnnnnnnnnnnnnnnnnnnnnnnnnnnnnnnnnnnnnnnnnnnnnnnnnnnnnnnnnnnnnnnnnnnnnnnnnnnnnnnnnnnnnnnnnnnnnnnnnnnnnnnnnnnnnnnnnnnnnnnnnnnnnnnnnnnnnnnnnnnnnnnnnnnnnnnnnnnnnnnnnnnnnnnnnnnnnnnnnnnnnnnnnnnnnnnnnnnnnnnnnnnnnnnnnnnnnnnnnnnnnnnnnnnnnnnnnnnnnnnnnnnnnnnnnnnnnnnnnnnnnnnnnnnnnnnnnnnnnnnnnnnnnnnnnnnnnnnnnnnnnnnnnnnnnnnnnnnnnnnnnnnnnnnnnnnnnnnnnnnnnnnnnnnnnnnnnnnnnnnnnnnnnnnnnnnnnnnnnnnnnnnnnnnnnnnnnnnnnnnnnnnnnnnnnnnnnnnnnnnnnnnnnnnnnnnnnnnnnnnnnnnnnnnnnnnnnnnnnnnnnnnnnnnnnnnnnnnnnnnnnnnnnnnnnnnnnnnnnnnnnnnnnnnnnnnnnnnnnnnnnnnnnnnnnnnnnnnnnnnnnnnnnnnnnnnnnnnnnnnnnnnnnnnnnnnnnnnnnnnnnnnnnnnnnnnnnnnnnnnnnnnnnnnnnnnnnnnnnnnnnnnnnnnnnnnnnnnnnnnnnnnnnnnnnnnnnnnnnnnnnnnnnnnnnnnnnnnnnnnnnnnnnnnnnnnnnnnnnnnnnnnnnnnnnnnnnnnnnnnnnnnnnnnnnnnnnnnnnnnnnnnnnnnnnnnnnnnnnnnnnnnnnnnnnnnnnnnnnnnnnnnnnnnnnnnnnnnnnnnnnnnnnnnnnnnnnnnnnnnnnnnnnnnnnnnnnnnnnnnnnnnnnnnnnnnnnnnnnnnnnnnnnnnnnnnnnnnnnnnnnnnnnnnnnnnnnnnnnnnnnnnnnnnnnnnnnnnnnnnnnnnnnnnnnnnnnnnnnnnnnnnnnnnnnnnnnnnnnnnnnnnnnnnnnnnnnnnnnnnnnnnnnnnnnnnnnnnnnnnnnnnnnnnnnnnnnnnnnnnnnnnnnnnnnnnnnnnnnnnnnnnnnnnnnnnnnnnnnnnnnnnnnnnnnnnnnnnnnnnnnnnnnnnnnnnnnnnnnnnnnnnnnnnnnnnnnnnnnnnnnnnnnnnnnnnnnnnnnnnnnnnnnnnnnnnnnnnnnnnnnnnnnnnnnnnnnnnnnnnnnnnnnnnnnnnnnnnnnnnnnnnnnnnnnnnnnnnnnnnnnnnnnnnnnnnnnnnnnnnnnnnnnnnnnnnnnnnnnnnnnnnnnnnnnnnnnnnnnnnnnnnnnnnnnnnnnnnnnnnnnnnnnnnnnnnnnnnnnnnnnnnnnnnnnnnnnnnnnnnnnnnnnnnnnnnnnnnnnnnnnnnnnnnnnnnnnnnnnnnnnnnnnnnnnnnnnnnnnnnnnnnnnnnnnnnnnnnnnnnnnnnnnnnnnnnnnnnnnnnnnnnnnnnnnnnnnnnnnnnnnnnnnnnnnnnnnnnnnnnnnnnnnnnnnnnnnnnnnnnnnnnnnnnnnnnnnnnnnnnnnnnnnnnnnnnnnnnnnnnnnnnnnnnnnnnnnnnnnnnnnnnnnnnnnnnnnnnnnnnnnnnnnnnnnnnnnnnnnnnnnnnnnnnnnnnnnnnnnnnnnnnnnnnnnnnnnnnnnnnnnnnnnnnnnnnnnnnnnnnnnnnnnnnnnnnnnnnnnnnnnnnnnnnnnnnnnnnnnnnnnnnnnnnnnnnnnnnnnnnnnnnnnnnnnnnnnnnnnnnnnnnnnnnnnnnnnnnnnnnnnnnnnnnnnnnnnnnnnnnnnnnnnnnnnnnnnnnnnnnnnnnnnnnnnnnnnnnnnnnnnnnnnnnnnnnnnnnnnnnnnnnnnnnnnnnnnnnnnnnnnnnnnnnnnnnnnnnnnnnnnnnnnnnnnnnnnnnnnnnnnnnnnnnnnnnnnnnnnnnnnnnnnnnnnnnnnnnnnnnnnnnnnnnnnnnnnnnnnnnnnnnnnnnnnnnnnnnnnnnnnnnnnnnnnnnnnnnnnnnnnnnnnnnnnnnnnnnnnnnnnnnnnnnnnnnnnnnnnnnnnnnnnnnnnnnnnnnnnnnnnnnnnnnnnnnnnnnnnnnnnnnnnnnnnnnnnnnnnnnnnnnnnnnnnnnnnnnnnnnnnnnnnnnnnnnnnnnnnnnnnnnnnnnnnnnnnnnnnnnnnnnnnnnnnnnnnnnnnnnnnnnnnnnnnnnnnnnnnnnnnnnnnnnnnnnnnnnnnnnnnnnnnnnnnnnnnnnnnnnnnnnnnnnnnnnnnnnnnnnnnnnnnnnnnnnnnnnnnnnnnnnnnnnnnnnnnnnnnnnnnnnnnnnnnnnnnnnnnnnnnnnnnnnnnnnnnnnnnnnnnnnnnnnnnnnnnnnnnnnnnnnnnnnnnnnnnnnnnnnnnnnnnnnnnnnnnnnnnnnnnnnnnnnnnnnnnnnnnnnnnnnnnnnnnnnnnnnnnnnnnnnnnnnnnnnnnnnnnnnnnnnnnnnnnnnnnnnnnnnnnnnnnnnnnnnnnnnnnnnnnnnnnnnnnnnnnnnnnnnnnnnnnnnnnnnnnnnnnnnnnnnnnnnnnnnnnnnnnnnnnnnnnnnnnnnnnnnnnnnnnnnnnnnnnnnnnnnnnnnnnnnnnnnnnnnnnnnnnnnnnnnnnnnnnnnnnnnnnnnnnnnnnnnnnnnnnnnnnnnnnnnnnnnnnnnnnnnnnnnnnnnnnnnnnnnnnnnnnnnnnnnnnnnnnnnnnnnnnnnnnnnnnnnnnnnnnnnnnnnnnnnnnnnnnnnnnnnnnnnnnnnnnnnnnnnnnnnnnnnnnnnnnnnnnnnnnnnnnnnnnnnnnnnnnnnnnnnnnnnnnnnnnnnnnnnnnnnnnnnnnnnnnnnnnnnnnnnnnnnnnnnnnnnnnnnnnnnnnnnnnnnnnnnnnnnnnnnnnnnnnnnnnnnnnnnnnnnnnnnnnnnnnnnnnnnnnnnnnnnnnnnnnnnnnnnnnnnnnnnnnnnnnnnnnnnnnnnnnnnnnnnnnnnnnnnnnnnnnnnnnnnnnnnnnnnnnnnnnnnnnnnnnnnnnnnnnnnnnnnnnnnnnnnnnnnnnnnnnnnnnnnnnnnnnnnnnnnnnnnnnnnnnnnnnnnnnnnnnnnnnnnnnnnnnnnnnnnnnnnnnnnnnnnnnnnnnnnnnnnnnnnnnnnnnnnnnnnnnnnnnnnnnnnnnnnnnnnnnnnnnnnnnnnnnnnnnnnnnnnnnnnnnnnnnnnnnnnnnnnnnnnnnnnnnnnnnnnnnnnnnnnnnnnnnnnnnnnnnnnnnnnnnnnnnnnnnnnnnnnnnnnnnnnnnnnnnnnnnnnnnnnnnnnnnnnnnnnnnnnnnnnnnnnnnnnnnnnnnnnnnnnnnnnnnnnnnnnnnnnnnnnnnnnnnnnnnnnnnnnnnnnnnnnnnnnnnnnnnnnnnnnnnnnnnnnnnnnnnnnnnnnnnnnnnnnnnnnnnnnnnnnnnnnnnnnnnnnnnnnnnnnnnnnnnnnnnnnnnnnnnnnnnnnnnnnnnnnnnnnnnnnnnnnnnnnnnnnnnnnnnnnnnnnnnnnnnnnnnnnnnnnnnnnnnnnnnnnnnnnnnnnnnnnnnnnnnnnnnnnnnnnnnnnnnnnnnnnnnnnnnnnnnnnnnnnnnnnnnnnnnnnnnnnnnnnnnnnnnnnnnnnnnnnnnnnnnnnnnnnnnnnnnnnnnnnnnnnnnnnnnnnnnnnnnnnnnnnnnnnnnnnnnnnnnnnnnnnnnnnnnnnnnnnnnnnnnnnnnnnnnnnnnnnnnnnnnnnnnnnnnnnnnnnnnnnnnnnnnnnnnnnnnnnnnnnnnnnnnnnnnnnnnnnnnnnnnnnnnnnnnnnnnnnnnnnnnnnnnnnnnnnnnnnnnnnnnnnnnnnnnnnnnnnnnnnnnnnnnnnnnnnnnnnnnnnnnnnnnnnnnnnnnnnnnnnnnnnnnnnnnnnnnnnnnnnnnnnnnnnnnnnnnnnnnnnnnnnnnnnnnnnnnnnnnnnnnnnnnnnnnnnnnnnnnnnnnnnnnnnnnnnnnnnnnnnnnnnnnnnnnnnnnnnnnnnnnnnnnnnnnnnnnnnnnnnnnnnnnnnnnnnnnnnnnnnnnnnnnnnnnnnnnnnnnnnnnnnnnnnnnnnnnnnnnnnnnnnnnnnnnnnnnnnnnnnnnnnnnnnnnnnnnnnnnnnnnnnnnnnnnnnnnnnnnnnnnnnnnnnnnnnnnnnnnnnnnnnnnnnnnnnnnnnnnnnnnnnnnnnnnnnnnnnnnnnnnnnnnnnnnnnnnnnnnnnnnnnnnnnnnnnnnnnnnnnnnnnnnnnnnnnnnnnnnnnnnnnnnnnnnnnnnnnnnnnnnnnnnnnnnnnnnnnnnnnnnnnnnnnnnnnnnnnnnnnnnnnnnnnnnnnnnnnnnnnnnnnnnnnnnnnnnnnnnnnnnnnnnnnnnnnnnnnnnnnnnnnnnnnnnnnnnnnnnnnnnnnnnnnnnnnnnnnnnnnnnnnnnnnnnnnnnnnnnnnnnnnnnnnnnnnnnnnnnnnnnnnnnnnnnnnnnnnnnnnnnnnnnnnnnnnnnnnnnnnnnnnnnnnnnnnnnnnnnnnnnnnnnnnnnnnnnnnnnnnnnnnnnnnnnnnnnnnnnnnnnnnnnnnnnnnnnnnnnnnnnnnnnnnnnnnnnnnnnnnnnnnnnnnnnnnnnnnnnnnnnnnnnnnnnnnnnnnnnnnnnnnnnnnnnnnnnnnnnnnnnnnnnnnnnnnnnnnnnnnnnnnnnnnnnnnnnnnnnnnnnnnnnnnnnnnnnnnnnnnnnnnnnnnnnnnnnnnnnnnnnnnnnnnnnnnnnnnnnnnnnnnnnnnnnnnnnnnnnnnnnnnnnnnnnnnnnnnnnnnnnnnnnnnnnnnnnnnnnnnnnnnnnnnnnnnnnnnnnnnnnnnnnnnnnnnnnnnnnnnnnnnnnnnnnnnnnnnnnnnnnnnnnnnnnnnnnnnnnnnnnnnnnnnnnnnnnnnnnnnnnnnnnnnnnnnnnnnnnnnnnnnnnnnnnnnnnnnnnnnnnnnnnnnnnnnnnnnnnnnnnnnnnnnnnnnnnnnnnnnnnnnnnnnnnnnnnnnnnnnnnnnnnnnnnnnnnnnnnnnnnnnnnnnnnnnnnnnnnnnnnnnnnnnnnnnnnnnnnnnnnnnnnnnnnnnnnnnnnnnnnnnnnnnnnnnnnnnnnnnnnnnnnnnnnnnnnnnnnnnnnnnnnnnnnnnnnnnnnnnnnnnnnnnnnnnnnnnnnnnnnnnnnnnnnnnnnnnnnnnnnnnnnnnnnnnnnnnnnnnnnnnnnnnnnnnnnnnnnnnnnnnnnnnnnnnnnnnnnnnnnnnnnnnnnnnnnnnnnnnnnnnnnnnnnnnnnnnnnnnnnnnnnnnnnnnnnnnnnnnnnnnnnnnnnnnnnnnnnnnnnnnnnnnnnnnnnnnnnnnnnnnnnnnnnnnnnnnnnnnnnnnnnnnnnnnnnnnnnnnnnnnnnnnnnnnnnnnnnnnnnnnnnnnnnnnnnnnnnnnnnnnnnnnnnnnnnnnnnnnnnnnnnnnnnnnnnnnnnnnnnnnnnnnnnnnnnnnnnnnnnnnnnnnnnnnnnnnnnnnnnnnnnnnnnnnnnnnnnnnnnnnnnnnnnnnnnnnnnnnnnnnnnnnnnnnnnnnnnnnnnnnnnnnnnnnnnnnnnnnnnnnnnnnnnnnnnnnnnnnnnnnnnnnnnnnnnnnnnnnnnnnnnnnnnnnnnnnnnnnnnnnnnnnnnnnnnnnnnnnnnnnnnnnnnnnnnnnnnnnnnnnnnnnnnnnnnnnnnnnnnnnnnnnnnnnnnnnnnnnnnnnnnnnnnnnnnnnnnnnnnnnnnnnnnnnnnnnnnnnnnnnnnnnnnnnnnnnnnnnnnnnnnnnnnnnnnnnnnnnnnnnnnnnnnnnnnnnnnnnnnnnnnnnnnnnnnnnnnnnnnnnnnnnnnnnnnnnnnnnnnnnnnnnnnnnnnnnnnnnnnnnnnnnnnnnnnnnnnnnnnnnnnnnnnnnnnnnnnnnnnnnnnnnnnnnnnnnnnnnnnnnnnnnnnnnnnnnnnnnnnnnnnnnnnnnnnnnnnnnnnnnnnnnnnnnnnnnnnnnnnnnnnnnnnnnnnnnnnnnnnnnnnnnnnnnnnnnnnnnnnnnnnnnnnnnnnnnnnnnnnnnnnnnnnnnnnnnnnnnnnnnnnnnnnnnnnnnnnnnnnnnnnnnnnnnnnnnnnnnnnnnnnnnnnnnnnnnnnnnnnnnnnnnnnnnnnnnnnnnnnnnnnnnnnnnnnnnnnnnnnnnnnnnnnnnnnnnnnnnnnnnnnnnnnnnnnnnnnnnnnnnnnnnnnnnnnnnnnnnnnnnnnnnnnnnnnnnnnnnnnnnnnnnnnnnnnnnnnnnnnnnnnnnnnnnnnnnnnnnnnnnnnnnnnnnnnnnnnnnnnnnnnnnnnnnnnnnnnnnnnnnnnnnnnnnnnnnnnnnnnnnnnnnnnnnnnnnnnnnnnnnnnnnnnnnnnnnnnnnnnnnnnnnnnnnnnnnnnnnnnnnnnnnnnnnnnnnnnnnnnnnnnnnnnnnnnnnnnnnnnnnnnnnnnnnnnnnnnnnnnnnnnnnnnnnnnnnnnnnnnnnnnnnnnnnnnnnnnnnnnnnnnnnnnnnnnnnnnnnnnnnnnnnnnnnnnnnnnnnnnnnnnnnnnnnnnnnnnnnnnnnnnnnnnnnnnnnnnnnnnnnnnnnnnnnnnnnnnnnnnnnnnnnnnnnnnnnnnnnnnnnnnnnnnnnnnnnnnnnnnnnnnnnnnnnnnnnnnnnnnnnnnnnnnnnnnnnnnnnnnnnnnnnnnnnnnnnnnnnnnnnnnnnnnnnnnnnnnnnnnnnnnnnnnnnnnnnnnnnnnnnnnnnnnnnnnnnnnnnnnnnnnnnnnnnnnnnnnnnnnnnnnnnnnnnnnnnnnnnnnnnnnnnnnnnnnnnnnnnnnnnnnnnnnnnnnnnnnnnnnnnnnnnnnnnnnnnnnnnnnnnnnnnnnnnnnnnnnnnnnnnnnnnnnnnnnnnnnnnnnnnnnnnnnnnnnnnnnnnnnnnnnnnnnnnnnnnnnnnnnnnnnnnnnnnnnnnnnnnnnnnnnnnnnnnnnnnnnnnnnnnnnnnnnnnnnnnnnnnnnnnnnnnnnnnnnnnnnnnnnnnnnnnnnnnnnnnnnnnnnnnnnnnnnnnnnnnnnnnnnnnnnnnnnnnnnnnnnnnnnnnnnnnnnnnnnnnnnnnnnnnnnnnnnnnnnnnnnnnnnnnnnnnnnnnnnnnnnnnnnnnnnnnnnnnnnnnnnnnnnnnnnnnnnnnnnnnnnnnnnnnnnnnnnnnnnnnnnnnnnnnnnnnnnnnnnnnnnnnnnnnnnnnnnnnnnnnnnnnnnnnnnnnnnnnnnnnnnnnnnnnnnnnnnnnnnnnnnnnnnnnnnnnnnnnnnnnnnnnnnnnnnnnnnnnnnnnnnnnnnnnnnnnnnnnnnnnnnnnnnnnnnnnnnnnnnnnnnnnnnnnnnnnnnnnnnnnnnnnnnnnnnnnnnnnnnnnnnnnnnnnnnnnnnnnnnnnnnnnnnnnnnnnnnnnnnnnnnnnnnnnnnnnnnnnnnnnnnnnnnnnnnnnnnnnnnnnnnnnnnnnnnnnnnnnnnnnnnnnnnnnnnnnnnnnnnnnnnnnnnnnnnnnnnnnnnnnnnnnnnnnnnnnnnnnnnnnnnnnnnnnnnnnnnnnnnnnnnnnnnnnnnnnnnnnnnnnnnnnnnnnnnnnnnnnnnnnnnnnnnnnnnnnnnnnnnnnnnnnnnnnnnnnnnnnnnnnnnnnnnnnnnnnnnnnnnnnnnnnnnnnnnnnnnnnnnnnnnnnnnnnnnnnnnnnnnnnnnnnnnnnnnnnnnnnnnnnnnnnnnnnnnnnnnnnnnnnnnnnnnnnnnnnnnnnnnnnnnnnnnnnnnnnnnnnnnnnnnnnnnnnnnnnnnnnnnnnnnnnnnnnnnnnnnnnnnnnnnnnnnnnnnnnnnnnnnnnnnnnnnnnnnnnnnnnnnnnnnnnnnnnnnnnnnnnnnnnnnnnnnnnnnnnnnnnnnnnnnnnnnnnnnnnnnnnnnnnnnnnnnnnnnnnnnnnnnnnnnnnnnnnnnnnnnnnnnnnnnnnnnnnnnnnnnnnnnnnnnnnnnnnnnnnnnnnnnnnnnnnnnnnnnnnnnnnnnnnnnnnnnnnnnnnnnnnnnnnnnnnnnnnnnnnnnnnnnnnnnnnnnnnnnnnnnnnnnnnnnnnnnnnnnnnnnnnnnnnnnnnnnnnnnnnnnnnnnnnnnnnnnnnnnnnnnnnnnnnnnnnnnnnnnnnnnnnnnnnnnnnnnnnnnnnnnnnnnnnnnnnnnnnnnnnnnnnnnnnnnnnnnnnnnnnnnnnnnnnnnnnnnnnnnnnnnnnnnnnnnnnnnnnnnnnnnnnnnnnnnnnnnnnnnnnnnnnnnnnnnnnnnnnnnnnnnnnnnnnnnnnnnnnnnnnnnnnnnnnnnnnnnnnnnnnnnnnnnnnnnnnnnnnnnnnnnnnnnnnnnnnnnnnnnnnnnnnnnnnnnnnnnnnnnnnnnnnnnnnnnnnnnnnnnnnnnnnnnnnnnnnnnnnnnnnnnnnnnnnnnnnnnnnnnnnnnnnnnnnnnnnnnnnnnnnnnnnnnnnnnnnnnnnnnnnnnnnnnnnnnnnnnnnnnnnnnnnnnnnnnnnnnnnnnnnnnnnnnnnnnnnnnnnnnnnnnnnnnnnnnnnnnnnnnnnnnnnnnnnnnnnnnnnnnnnnnnnnnnnnnnnnnnnnnnnnnnnnnnnnnnnnnnnnnnnnnnnnnnnnnnnnnnnnnnnnnnnnnnnnnnnnnnnnnnnnnnnnnnnnnnnnnnnnnnnnnnnnnnnnnnnnnnnnnnnnnnnnnnnnnnnnnnnnnnnnnnnnnnnnnnnnnnnnnnnnnnnnnnnnnnnnnnnnnnnnnnnnnnnnnnnnnnnnnnnnnnnnnnnnnnnnnnnnnnnnnnnnnnnnnnnnnnnnnnnnnnnnnnnnnnnnnnnnnnnnnnnnnnnnnnnnnnnnnnnnnnnnnnnnnnnnnnnnnnnnnnnnnnnnnnnnnnnnnnnnnnnnnnnnnnnnnnnnnnnnnnnnnnnnnnnnnnnnnnnnnnnnnnnnnnnnnnnnnnnnnnnnnnnnnnnnnnnnnnnnnnnnnnnnnnnnnnnnnnnnnnnnnnnnnnnnnnnnnnnnnnnnnnnnnnnnnnnnnnnnnnnnnnnnnnnnnnnnnnnnnnnnnnnnnnnnnnnnnnnnnnnnnnnnnnnnnnnnnnnnnnnnnnnnnnnnnnnnnnnnnnnnnnnnnnnnnnnnnnnnnnnnnnnnnnnnnnnnnnnnnnnnnnnnnnnnnnnnnnnnnnnnnnnnnnnnnnnnnnnnnnnnnnnnnnnnnnnnnnnnnnnnnnnnnnnnnnnnnnnnnnnnnnnnnnnnnnnnnnnnnnnnnnnnnnnnnnnnnnnnnnnnnnnnnnnnnnnnnnnnnnnnnnnnnnnnnnnnnnnnnnnnnnnnnnnnnnnnnnnnnnnnnnnnnnnnnnnnnnnnnnnnnnnnnnnnnnnnnnnnnnnnnnnnnnnnnnnnnnnnnnnnnnnnnnnnnnnnnnnnnnnnnnnnnnnnnnnnnnnnnnnnnnnnnnnnnnnnnnnnnnnnnnnnnnnnnnnnnnnnnnnnnnnnnnnnnnnnnnnnnnnnnnnnnnnnnnnnnnnnnnnnnnnnnnnnnnnnnnnnnnnnnnnnnnnnnnnnnnnnnnnnnnnnnnnnnnnnnnnnnnnnnnnnnnnnnnnnnnnnnnnnnnnnnnnnnnnnnnnnnnnnnnnnnnnnnnnnnnnnnnnnnnnnnnnnnnnnnnnnnnnnnnnnnnnnnnnnnnnnnnnnnnnnnnnnnnnnnnnnnnnnnnnnnnnnnnnnnnnnnnnnnnnnnnnnnnnnnnnnnnnnnnnnnnnnnnnnnnnnnnnnnnnnnnnnnnnnnnnnnnnnnnnnnnnnnnnnnnnnnnnnnnnnnnnnnnnnnnnnnnnnnnnnnnnnnnnnnnnnnnnnnnnnnnnnnnnnnnnnnnnnnnnnnnnnnnnnnnnnnnnnnnnnnnnnnnnnnnnnnnnnnnnnnnnnnnnnnnnnnnnnnnnnnnnnnnnnnnnnnnnnnnnnnnnnnnnnnnnnnnnnnnnnnnnnnnnnnnnnnnnnnnnnnnnnnnnnnnnnnnnnnnnnnnnnnnnnnnnnnnnnnnnnnnnnnnnnnnnnnnnnnnnnnnnnnnnnnnnnnnnnnnnnnnnnnnnnnnnnnnnnnnnnnnnnnnnnnnnnnnnnnnnnnnnnnnnnnnnnnnnnnnnnnnnnnnnnnnnnnnnnnnnnnnnnnnnnnnnnnnnnnnnnnnnnnnnnnnnnnnnnnnnnnnnnnnnnnnnnnnnnnnnnnnnnnnnnnnnnnnnnnnnnnnnnnnnnnnnnnnnnnnnnnnnnnnnnnnnnnnnnnnnnnnnnnnnnnnnnnnnnnnnnnnnnnnnnnnnnnnnnnnnnnnnnnnnnnnnnnnnnnnnnnnnnnnnnnnnnnnnnnnnnnnnnnnnnnnnnnnnnnnnnnnnnnnnnnnnnnnnnnnnnnnnnnnnnnnnnnnnnnnnnnnnnnnnnnnnnnnnnnnnnnnnnnnnnnnnnnnnnnnnnnnnnnnnnnnnnnnnnnnnnnnnnnnnnnnnnnnnnnnnnnnnnnnnnnnnnnnnnnnnnnnnnnnnnnnnnnnnnnnnnnnnnnnnnnnnnnnnnnnnnnnnnnnnnnnnnnnnnnnnnnnnnnnnnnnnnnnnnnnnnnnnnnnnnnnnnnnnnnnnnnnnnnnnnnnnnnnnnnnnnnnnnnnnnnnnnnnnnnnnnnnnnnnnnnnnnnnnnnnnnnnnnnnnnnnnnnnnnnnnnnnnnnnnnnnnnnnnnnnnnnnnnnnnnnnnnnnnnnnnnnnnnnnnnnnnnnnnnnnnnnnnnnnnnnnnnnnnnnnnnnnnnnnnnnnnnnnnnnnnnnnnnnnnnnnnnnnnnnnnnnnnnnnnnnnnnnnnnnnnnnnnnnnnnnnnnnnnnnnnnnnnnnnnnnnnnnnnnnnnnnnnnnnnnnnnnnnnnnnnnnnnnnnnnnnnnnnnnnnnnnnnnnnnnnnnnnnnnnnnnnnnnnnnnnnnnnnnnnnnnnnnnnnnnnnnnnnnnnnnnnnnnnnnnnnnnnnnnnnnnnnnnnnnnnnnnnnnnnnnnnnnnnnnnnnnnnnnnnnnnnnnnnnnnnnnnnnnnnnnnnnnnnnnnnnnnnnnnnnnnnnnnnnnnnnnnnnnnnnnnnnnnnnnnnnnnnnnnnnnnnnnnnnnnnnnnnnnnnnnnnnnnnnnnnnnnnnnnnnnnnnnnnnnnnnnnnnnnnnnnnnnnnnnnnnnnnnnnnnnnnnnnnnnnnnnnnnnnnnnnnnnnnnnnnnnnnnnnnnnnnnnnnnnnnnnnnnnnnnnnnnnnnnnnnnnnnnnnnnnnnnnnnnnnnnnnnnnnnnnnnnnnnnnnnnnnnnnnnnnnnnnnnnnnnnnnnnnnnnnnnnnnnnnnnnnnnnnnnnnnnnnnnnnnnnnnnnnnnnnnnnnnnnnnnnnnnnnnnnnnnnnnnnnnnnnnnnnnnnnnnnnnnnnnnnnnnnnnnnnnnnnnnnnnnnnnnnnnnnnnnnnnnnnnnnnnnnnnnnnnnnnnnnnnnnnnnnnnnnnnnnnnnnnnnnnnnnnnnnnnnnnnnnnnnnnnnnnnnnnnnnnnnnnnnnnnnnnnnnnnnnnnnnnnnnnnnnnnnnnnnnnnnnnnnnnnnnnnnnnnnnnnnnnnnnnnnnnnnnnnnnnnnnnnnnnnnnnnnnnnnnnnnnnnnnnnnnnnnnnnnnnnnnnnnnnnnnnnnnnnnnnnnnnnnnnnnnnnnnnnnnnnnnnnnnnnnnnnnnnnnnnnnnnnnnnnnnnnnnnnnnnnnnnnnnnnnnnnnnnnnnnnnnnnnnnnnnnnnnnnnnnnnnnnnnnnnnnnnnnnnnnnnnnnnnnnnnnnnnnnnnnnnnnnnnnnnnnnnnnnnnnnnnnnnnnnnnnnnnnnnnnnnnnnnnnnnnnnnnnnnnnnnnnnnnnnnnnnnnnnnnnnnnnnnnnnnnnnnnnnnnnnnnnnnnnnnnnnnnnnnnnnnnnnnnnnnnnnnnnnnnnnnnnnnnnnnnnnnnnnnnnnnnnnnnnnnnnnnnnnnnnnnnnnnnnnnnnnnnnnnnnnnnnnnnnnnnnnnnnnnnnnnnnnnnnnnnnnnnnnnnnnnnnnnnnnnnnnnnnnnnnnnnnnnnnnnnnnnnnnnnnnnnnnnnnnnnnnnnnnnnnnnnnnnnnnnnnnnnnnnnnnnnnnnnnnnnnnnnnnnnnnnnnnnnnnnnnnnnnnnnnnnnnnnnnnnnnnnnnnnnnnnnnnnnnnnnnnnnnnnnnnnnnnnnnnnnnnnnnnnnnnnnnnnnnnnnnnnnnnnnnnnnnnnnnnnnnnnnnnnnnnnnnnnnnnnnnnnnnnnnnnnnnnnnnnnnnnnnnnnnnnnnnnnnnnnnnnnnnnnnnnnnnnnnnnnnnnnnnnnnnnnnnnnnnnnnnnnnnnnnnnnnnnnnnnnnnnnnnnnnnnnnnnnnnnnnnnnnnnnnnnnnnnnnnnnnnnnnnnnnnnnnnnnnnnnnnnnnnnnnnnnnnnnnnnnnnnnnnnnnnnnnnnnnnnnnnnnnnnnnnnnnnnnnnnnnnnnnnnnnnnnnnnnnnnnnnnnnnnnnnnnnnnnnnnnnnnnnnnnnnnnnnnnnnnnnnnnnnnnnnnnnnnnnnnnnnnnnnnnnnnnnnnnnnnnnnnnnnnnnnnnnnnnnnnnnnnnnnnnnnnnnnnnnnnnnnnnnnnnnnnnnnnnnnnnnnnnnnnnnnnnnnnnnnnnnnnnnnnnnnnnnnnnnnnnnnnnnnnnnnnnnnnnnnnnnnnnnnnnnnnnnnnnnnnnnnnnnnnnnnnnnnnnnnnnnnnnnnnnnnnnnnnnnnnnnnnnnnnnnnnnnnnnnnnnnnnnnnnnnnnnnnnnnnnnnnnnnnnnnnnnnnnnnnnnnnnnnnnnnnnnnnnnnnnnnnnnnnnnnnnnnnnnnnnnnnnnnnnnnnnnnnnnnnnnnnnnnnnnnnnnnnnnnnnnnnnnnnnnnnnnnnnnnnnnnnnnnnnnnnnnnnnnnnnnnnnnnnnnnnnnnnnnnnnnnnnnnnnnnnnnnnnnnnnnnnnnnnnnnnnnnnnnnnnnnnnnnnnnnnnnnnnnnnnnnnnnnnnnnnnnnnnnnnnnnnnnnnnnnnnnnnnnnnnnnnnnnnnnnnnnnnnnnnnnnnnnnnnnnnnnnnnnnnnnnnnnnnnnnnnnnnnnnnnnnnnnnnnnnnnnnnnnnnnnnnnnnnnnnnnnnnnnnnnnnnnnnnnnnnnnnnnnnnnnnnnnnnnnnnnnnnnnnnnnnnnnnnnnnnnnnnnnnnnnnnnnnnnnnnnnnnnnnnnnnnnnnnnnnnnnnnnnnnnnnnnnnnnnnnnnnnnnnnnnnnnnnnnnnnnnnnnnnnnnnnnnnnnnnnnnnnnnnnnnnnnnnnnnnnnnnnnnnnnnnnnnnnnnnnnnnnnnnnnnnnnnnnnnnnnnnnnnnnnnnnnnnnnnnnnnnnnnnnnnnnnnnnnnnnnnnnnnnnnnnnnnnnnnnnnnnnnnnnnnnnnnnnnnnnnnnnnnnnnnnnnnnnnnnnnnnnnnnnnnnnnnnnnnnnnnnnnnnnnnnnnnnnnnnnnnnnnnnnnnnnnnnnnnnnnnnnnnnnnnnnnnnnnnnnnnnnnnnnnnnnnnnnnnnnnnnnnnnnnnnnnnnnnnnnnnnnnnnnnnnnnnnnnnnnnnnnnnnnnnnnnnnnnnnnnnnnnnnnnnnnnnnnnnnnnnnnnnnnnnnnnnnnnnnnnnnnnnnnnnnnnnnnnnnnnnnnnnnnnnnnnnnnnnnnnnnnnnnnnnnnnnnnnnnnnnnnnnnnnnnnnnnnnnnnnnnnnnnnnnnnnnnnnnnnnnnnnnnnnnnnnnnnnnnnnnnnnnnnnnnnnnnnnnnnnnnnnnnnnnnnnnnnnnnnnnnnnnnnnnnnnnnnnnnnnnnnnnnnnnnnnnnnnnnnnnnnnnnnnnnnnnnnnnnnnnnnnnnnnnnnnnnnnnnnnnnnnnnnnnnnnnnnnnnnnnnnnnnnnnnnnnnnnnnnnnnnnnnnnnnnnnnnnnnnnnnnnnnnnnnnnnnnnnnnnnnnnnnnnnnnnnnnnnnnnnnnnnnnnnnnnnnnnnnnnnnnnnnnnnnnnnnnnnnnnnnnnnnnnnnnnnnnnnnnnnnnnnnnnnnnnnnnnnnnnnnnnnnnnnnnnnnnnnnnnnnnnnnnnnnnnnnnnnnnnnnnnnnnnnnnnnnnnnnnnnnnnnnnnnnnnnnnnnnnnnnnnnnnnnnnnnnnnnnnnnnnnnnnnnnnnnnnnnnnnnnnnnnnnnnnnnnnnnnnnnnnnnnnnnnnnnnnnnnnnnnnnnnnnnnnnnnnnnnnnnnnnnnnnnnnnnnnnnnnnnnnnnnnnnnnnnnnnnnnnnnnnnnnnnnnnnnnnnnnnnnnnnnnnnnnnnnnnnnnnnnnnnnnnnnnnnnnnnnnnnnnnnnnnnnnnnnnnnnnnnnnnnnnnnnnnnnnnnnnnnnnnnnnnnnnnnnnnnnnnnnnnnnnnnnnnnnnnnnnnnnnnnnnnnnnnnnnnnnnnnnnnnnnnnnnnnnnnnnnnnnnnnnnnnnnnnnnnnnnnnnnnnnnnnnnnnnnnnnnnnnnnnnnnnnnnnnnnnnnnnnnnnnnnnnnnnnnnnnnnnnnnnnnnnnnnnnnnnnnnnnnnnnnnnnnnnnnnnnnnnnnnnnnnnnnnnnnnnnnnnnnnnnnnnnnnnnnnnnnnnnnnnnnnnnnnnnnnnnnnnnnnnnnnnnnnnnnnnnnnnnnnnnnnnnnnnnnnnnnnnnnnnnnnnnnnnnnnnnnnnnnnnnnnnnnnnnnnnnnnnnnnnnnnnnnnnnnnnnnnnnnnnnnnnnnnnnnnnnnnnnnnnnnnnnnnnnnnnnnnnnnnnnnnnnnnnnnnnnnnnnnnnnnnnnnnnnnnnnnnnnnnnnnnnnnnnnnnnnnnnnnnnnnnnnnnnnnnnnnnnnnnnnnnnnnnnnnnnnnnnnnnnnnnnnnnnnnnnnnnnnnnnnnnnnnnnnnnnnnnnnnnnnnnnnnnnnnnnnnnnnnnnnnnnnnnnnnnnnnnnnnnnnnnnnnnnnnnnnnnnnnnnnnnnnnnnnnnnnnnnnnnnnnnnnnnnnnnnnnnnnnnnnnnnnnnnnnnnnnnnnnnnnnnnnnnnnnnnnnnnnnnnnnnnnnnnnnnnnnnnnnnnnnnnnnnnnnnnnnnnnnnnnnnnnnnnnnnnnnnnnnnnnnnnnnnnnnnnnnnnnnnnnnnnnnnnnnnnnnnnnnnnnnnnnnnnnnnnnnnnnnnnnnnnnnnnnnnnnnnnnnnnnnnnnnnnnnnnnnnnnnnnnnnnnnnnnnnnnnnnnnnnnnnnnnnnnnnnnnnnnnnnnnnnnnnnnnnnnnnnnnnnnnnnnnnnnnnnnnnnnnnnnnnnnnnnnnnnnnnnnnnnnnnnnnnnnnnnnnnnnnnnnnnnnnnnnnnnnnnnnnnnnnnnnnnnnnnnnnnnnnnnnnnnnnnnnnnnnnnnnnnnnnnnnnnnnnnnnnnnnnnnnnnnnnnnnnnnnnnnnnnnnnnnnnnnnnnnnnnnnnnnnnnnnnnnnnnnnnnnnnnnnnnnnnnnnnnnnnnnnnnnnnnnnnnnnnnnnnnnnnnnnnnnnnnnnnnnnnnnnnnnnnnnnnnnnnnnnnnnnnnnnnnnnnnnnnnnnnnnnnnnnnnnnnnnnnnnnnnnnnnnnnnnnnnnnnnnnnnnnnnnnnnnnnnnnnnnnnnnnnnnnnnnnnnnnnnnnnnnnnnnnnnnnnnnnnnnnnnnnnnnnnnnnnnnnnnnnnnnnnnnnnnnnnnnnnnnnnnnnnnnnnnnnnnnnnnnnnnnnnnnnnnnnnnnnnnnnnnnnnnnnnnnnnnnnnnnnnnnnnnnnnnnnnnnnnnnnnnnnnnnnnnnnnnnnnnnnnnnnnnnnnnnnnnnnnnnnnnnnnnnnnnnnnnnnnnnnnnnnnnnnnnnnnnnnnnnnnnnnnnnnnnnnnnnnnnnnnnnnnnnnnnnnnnnnnnnnnnnnnnnnnnnnnnnnnnnnnnnnnnnnnnnnnnnnnnnnnnnnnnnnnnnnnnnnnnnnnnnnnnnnnnnnnnnnnnnnnnnnnnnnnnnnnnnnnnnnnnnnnnnnnnnnnnnnnnnnnnnnnnnnnnnnnnnnnnnnnnnnnnnnnnnnnnnnnnnnnnnnnnnnnnnnnnnnnnnnnnnnnnnnnnnnnnnnnnnnnnnnnnnnnnnnnnnnnnnnnnnnnnnnnnnnnnnnnnnnnnnnnnnnnnnnnnnnnnnnnnnnnnnnnnnnnnnnnnnnnnnnnnnnnnnnnnnnnnnnnnnnnnnnnnnnnnnnnnnnnnnnnnnnnnnnnnnnnnnnnnnnnnnnnnnnnnnnnnnnnnnnnnnnnnnnnnnnnnnnnnnnnnnnnnnnnnnnnnnnnnnnnnnnnnnnnnnnnnnnnnnnnnnnnnnnnnnnnnnnnnnnnnnnnnnnnnnnnnnnnnnnnnnnnnnnnnnnnnnnnnnnnnnnnnnnnnnnnnnnnnnnnnnnnnnnnnnnnnnnnnnnnnnnnnnnnnnnnnnnnnnnnnnnnnnnnnnnnnnnnnnnnnnnnnnnnnnnnnnnnnnnnnnnnnnnnnnnnnnnnnnnnnnnnnnnnnnnnnnnnnnnnnnnnnnnnnnnnnnnnnnnnnnnnnnnnnnnnnnnnnnnnnnnnnnnnnnnnnnnnnnnnnnnnnnnnnnnnnnnnnnnnnnnnnnnnnnnnnnnnnnnnnnnnnnnnnnnnnnnnnnnnnnnnnnnnnnnnnnnnnnnnnnnnnnnnnnnnnnnnnnnnnnnnnnnnnnnnnnnnnnnnnnnnnnnnnnnnnnnnnnnnnnnnnnnnnnnnnnnnnnnnnnnnnnnnnnnnnnnnnnnnnnnnnnnnnnnnnnnnnnnnnnnnnnnnnnnnnnnnnnnnnnnnnnnnnnnnnnnnnnnnnnnnnnnnnnnnnnnnnnnnnnnnnnnnnnnnnnnnnnnnnnnnnnnnnnnnnnnnnnnnnnnnnnnnnnnnnnnnnnnnnnnnnnnnnnnnnnnnnnnnnnnnnnnnnnnnnnnnnnnnnnnnnnnnnnnnnnnnnnnnnnnnnnnnnnnnnnnnnnnnnnnnnnnnnnnnnnnnnnnnnnnnnnnnnnnnnnnnnnnnnnnnnnnnnnnnnnnnnnnnnnnnnnnnnnnnnnnnnnnnnnnnnnnnnnnnnnnnnnnnnnnnnnnnnnnnnnnnnnnnnnnnnnnnnnnnnnnnnnnnnnnnnnnnnnnnnnnnnnnnnnnnnnnnnnnnnnnnnnnnnnnnnnnnnnnnnnnnnnnnnnnnnnnnnnnnnnnnnnnnnnnnnnnnnnnnnnnnnnnnnnnnnnnnnnnnnnnnnnnnnnnnnnnnnnnnnnnnnnnnnnnnnnnnnnnnnnnnnnnnnnnnnnnnnnnnnnnnnnnnnnnnnnnnnnnnnnnnnnnnnnnnnnnnnnnnnnnnnnnnnnnnnnnnnnnnnnnnnnnnnnnnnnnnnnnnnnnnnnnnnnnnnnnnnnnnnnnnnnnnnnnnnnnnnnnnnnnnnnnnnnnnnnnnnnnnnnnnnnnnnnnnnnnnnnnnnnnnnnnnnnnnnnnnnnnnnnnnnnnnnnnnnnnnnnnnnnnnnnnnnnnnnnnnnnnnnnnnnnnnnnnnnnnnnnnnnnnnnnnnnnnnnnnnnnnnnnnnnnnnnnnnnnnnnnnnnnnnnnnnnnnnnnnnnnnnnnnnnnnnnnnnnnnnnnnnnnnnnnnnnnnnnnnnnnnnnnnnnnnnnnnnnnnnnnnnnnnnnnnnnnnnnnnnnnnnnnnnnnnnnnnnnnnnnnnnnnnnnnnnnnnnnnnnnnnnnnnnnnnnnnnnnnnnnnnnnnnnnnnnnnnnnnnnnnnnnnnnnnnnnnnnnnnnnnnnnnnnnnnnnnnnnnnnnnnnnnnnnnnnnnnnnnnnnnnnnnnnnnnnnnnnnnnnnnnnnnnnnnnnnnnnnnnnnnnnnnnnnnnnnnnnnnnnnnnnnnnnnnnnnnnnnnnnnnnnnnnnnnnnnnnnnnnnnnnnnnnnnnnnnnnnnnnnnnnnnnnnnnnnnnnnnnnnnnnnnnnnnnnnnnnnnnnnnnnnnnnnnnnnnnnnnnnnnnnnnnnnnnnnnnnnnnnnnnnnnnnnnnnnnnnnnnnnnnnnnnnnnnnnnnnnnnnnnnnnnnnnnnnnnnnnnnnnnnnnnnnnnnnnnnnnnnnnnnnnnnnnnnnnnnnnnnnnnnnnnnnnnnnnnnnnnnnnnnnnnnnnnnnnnnnnnnnnnnnnnnnnnnnnnnnnnnnnnnnnnnnnnnnnnnnnnnnnnnnnnnnnnnnnnnnnnnnnnnnnnnnnnnnnnnnnnnnnnnnnnnnnnnnnnnnnnnnnnnnnnnnnnnnnnnnnnnnnnnnnnnnnnnnnnnnnnnnnnnnnnnnnnnnnnnnnnnnnnnnnnnnnnnnnnnnnnnnnnnnnnnnnnnnnnnnnnnnnnnnnnnnnnnnnnnnnnnnnnnnnnnnnnnnnnnnnnnnnnnnnnnnnnnnnnnnnnnnnnnnnnnnnnnnnnnnnnnnnnnnnnnnnnnnnnnnnnnnnnnnnnnnnnnnnnnnnnnnnnnnnnnnnnnnnnnnnnnnnnnnnnnnnnnnnnnnnnnnnnnnnnnnnnnnnnnnnnnnnnnnnnnnnnnnnnnnnnnnnnnnnnnnnnnnnnnnnnnnnnnnnnnnnnnnnnnnnnnnnnnnnnnnnnnnnnnnnnnnnnnnnnnnnnnnnnnnnnnnnnnnnnnnnnnnnnnnnnnnnnnnnnnnnnnnnnnnnnnnnnnnnnnnnnnnnnnnnnnnnnnnnnnnnnnnnnnnnnnnnnnnnnnnnnnnnnnnnnnnnnnnnnnnnnnnnnnnnnnnnnnnnnnnnnnnnnnnnnnnnnnnnnnnnnnnnnnnnnnnnnnnnnnnnnnnnnnnnnnnnnnnnnnnnnnnnnnnnnnnnnnnnnnnnnnnnnnnnnnnnnnnnnnnnnnnnnnnnnnnnnnnnnnnnnnnnnnnnnnnnnnnnnnnnnnnnnnnnnnnnnnnnnnnnnnnnnnnnnnnnnnnnnnnnnnnnnnnnnnnnnnnnnnnnnnnnnnnnnnnnnnnnnnnnnnnnnnnnnnnnnnnnnnnnnnnnnnnnnnnnnnnnnnnnnnnnnnnnnnnnnnnnnnnnnnnnnnnnnnnnnnnnnnnnnnnnnnnnnnnnnnnnnnnnnnnnnnnnnnnnnnnnnnnnnnnnnnnnnnnnnnnnnnnnnnnnnnnnnnnnnnnnnnnnnnnnnnnnnnnnnnnnnnnnnnnnnnnnnnnnnnnnnnnnnnnnnnnnnnnnnnnnnnnnnnnnnnnnnnnnnnnnnnnnnnnnnnnnnnnnnnnnnnnnnnnnnnnnnnnnnnnnnnnnnnnnnnnnnnnnnnnnnnnnnnnnnnnnnnnnnnnnnnnnnnnnnnnnnnnnnnnnnnnnnnnnnnnnnnnnnnnnnnnnnnnnnnnnnnnnnnnnnnnnnnnnnnnnnnnnnnnnnnnnnnnnnnnnnnnnnnnnnnnnnnnnnnnnnnnnnnnnnnnnnnnnnnnnnnnnnnnnnnnnnnnnnnnnnnnnnnnnnnnnnnnnnnnnnnnnnnnnnnnnnnnnnnnnnnnnnnnnnnnnnnnnnnnnnnnnnnnnnnnnnnnnnnnnnnnnnnnnnnnnnnnnnnnnnnnnnnnnnnnnnnnnnnnnnnnnnnnnnnnnnnnnnnnnnnnnnnnnnnnnnnnnnnnnnnnnnnnnnnnnnnnnnnnnnnnnnnnnnnnnnnnnnnnnnnnnnnnnnnnnnnnnnnnnnnnnnnnnnnnnnnnnnnnnnnnnnnnnnnnnnnnnnnnnnnnnnnnnnnnnnnnnnnnnnnnnnnnnnnnnnnnnnnnnnnnnnnnnnnnnnnnnnnnnnnnnnnnnnnnnnnnnnnnnnnnnnnnnnnnnnnnnnnnnnnnnnnnnnnnnnnnnnnnnnnnnnnnnnnnnnnnnnnnnnnnnnnnnnnnnnnnnnnnnnnnnnnnnnnnnnnnnnnnnnnnnnnnnnnnnnnnnnnnnnnnnnnnnnnnnnnnnnnnnnnnnnnnnnnnnnnnnnnnnnnnnnnnnnnnnnnnnnnnnnnnnnnnnnnnnnnnnnnnnnnnnnnnnnnnnnnnnnnnnnnnnnnnnnnnnnnnnnnnnnnnnnnnnnnnnnnnnnnnnnnnnnnnnnnnnnnnnnnnnnnnnnnnnnnnnnnnnnnnnnnnnnnnnnnnnnnnnnnnnnnnnnnnnnnnnnnnnnnnnnnnnnnnnnnnnnnnnnnnnnnnnnnnnnnnnnnnnnnnnnnnnnnnnnnnnnnnnnnnnnnnnnnnnnnnnnnnnnnnnnnnnnnnnnnnnnnnnnnnnnnnnnnnnnnnnnnnnnnnnnnnnnnnnnnnnnnnnnnnnnnnnnnnnnnnnnnnnnnnnnnnnnnnnnnnnnnnnnnnnnnnnnnnnnnnnnnnnnnnnnnnnnnnnnnnnnnnnnnnnnnnnnnnnnnnnnnnnnnnnnnnnnnnnnnnnnnnnnnnnnnnnnnnnnnnnnnnnnnnnnnnnnnnnnnnnnnnnnnnnnnnnnnnnnnnnnnnnnnnnnnnnnnnnnnnnnnnnnnnnnnnnnnnnnnnnnnnnnnnnnnnnnnnnnnnnnnnnnnnnnnnnnnnnnnnnnnnnnnnnnnnnnnnnnnnnnnnnnnnnnnnnnnnnnnnnnnnnnnnnnnnnnnnnnnnnnnnnnnnnnnnnnnnnnnnnnnnnnnnnnnnnnnnnnnnnnnnnnnnnnnnnnnnnnnnnnnnnnnnnnnnnnnnnnnnnnnnnnnnnnnnnnnnnnnnnnnnnnnnnnnnnnnnnnnnnnnnnnnnnnnnnnnnnnnnnnnnnnnnnnnnnnnnnnnnnnnnnnnnnnnnnnnnnnnnnnnnnnnnnnnnnnnnnnnnnnnnnnnnnnnnnnnnnnnnnnnnnnnnnnnnnnnnnnnnnnnnnnnnnnnnnnnnnnnnnnnnnnnnnnnnnnnnnnnnnnnnnnnnnnnnnnnnnnnnnnnnnnnnnnnnnnnnnnnnnnnnnnnnnnnnnnnnnnnnnnnnnnnnnnnnnnnnnnnnnnnnnnnnnnnnnnnnnnnnnnnnnnnnnnnnnnnnnnnnnnnnnnnnnnnnnnnnnnnnnnnnnnnnnnnnnnnnnnnnnnnnnnnnnnnnnnnnnnnnnnnnnnnnnnnnnnnnnnnnnnnnnnnnnnnnnnnnnnnnnnnnnnnnnnnnnnnnnnnnnnnnnnnnnnnnnnnnnnnnnnnnnnnnnnnnnnnnnnnnnnnnnnnnnnnnnnnnnnnnnnnnnnnnnnnnnnnnnnnnnnnnnnnnnnnnnnnnnnnnnnnnnnnnnnnnnnnnnnnnnnnnnnnnnnnnnnnnnnnnnnnnnnnnnnnnnnnnnnnnnnnnnnnnnnnnnnnnnnnnnnnnnnnnnnnnnnnnnnnnnnnnnnnnnnnnnnnnnnnnnnnnnnnnnnnnnnnnnnnnnnnnnnnnnnnnnnnnnnnnnnnnnnnnnnnnnnnnnnnnnnnnnnnnnnnnnnnnnnnnnnnnnnnnnnnnnnnnnnnnnnnnnnnnnnnnnnnnnnnnnnnnnnnnnnnnnnnnnnnnnnnnnnnnnnnnnnnnnnnnnnnnnnnnnnnnnnnnnnnnnnnnnnnnnnnnnnnnnnnnnnnnnnnnnnnnnnnnnnnnnnnnnnnnnnnnnnnnnnnnnnnnnnnnnnnnnnnnnnnnnnnnnnnnnnnnnnnnnnnnnnnnnnnnnnnnnnnnnnnnnnnnnnnnnnnnnnnnnnnnnnnnnnnnnnnnnnnnnnnnnnnnnnnnnnnnnnnnnnnnnnnnnnnnnnnnnnnnnnnnnnnnnnnnnnnnnnnnnnnnnnnnnnnnnnnnnnnnnnnnnnnnnnnnnnnnnnnnnnnnnnnnnnnnnnnnnnnnnnnnnnnnnnnnnnnnnnnnnnnnnnnnnnnnnnnnnnnnnnnnnnnnnnnnnnnnnnnnnnnnnnnnnnnnnnnnnnnnnnnnnnnnnnnnnnnnnnnnnnnnnnnnnnnnnnnnnnnnnnnnnnnnnnnnnnnnnnnnnnnnnnnnnnnnnnnnnnnnnnnnnnnnnnnnnnnnnnnnnnnnnnnnnnnnnnnnnnnnnnnnnnnnnnnnnnnnnnnnnnnnnnnnnnnnnnnnnnnnnnnnnnnnnnnnnnnnnnnnnnnnnnnnnnnnnnnnnnnnnnnnnnnnnnnnnnnnnnnnnnnnnnnnnnnnnnnnnnnnnnnnnnnnnnnnnnnnnnnnnnnnnnnnnnnnnnnnnnnnnnnnnnnnnnnnnnnnnnnnnnnnnnnnnnnnnnnnnnnnnnnnnnnnnnnnnnnnnnnnnnnnnnnnnnnnnnnnnnnnnnnnnnnnnnnnnnnnnnnnnnnnnnnnnnnnnnnnnnnnnnnnnnnnnnnnnnnnnnnnnnnnnnnnnnnnnnnnnnnnnnnnnnnnnnnnnnnnnnnnnnnnnnnnnnnnnnnnnnnnnnnnnnnnnnnnnnnnnnnnnnnnnnnnnnnnnnnnnnnnnnnnnnnnnnnnnnnnnnnnnnnnnnnnnnnnnnnnnnnnnnnnnnnnnnnnnnnnnnnnnnnnnnnnnnnnnnnnnnnnnnnnnnnnnnnnnnnnnnnnnnnnnnnnnnnnnnnnnnnnnnnnnnnnnnnnnnnnnnnnnnnnnnnnnnnnnnnnnnnnnnnnnnnnnnnnnnnnnnnnnnnnnnnnnnnnnnnnnnnnnnnnnnnnnnnnnnnnnnnnnnnnnnnnnnnnnnnnnnnnnnnnnnnnnnnnnnnnnnnnnnnnnnnnnnnnnnnnnnnnnnnnnnnnnnnnnnnnnnnnnnnnnnnnnnnnnnnnnnnnnnnnnnnnnnnnnnnnnnnnnnnnnnnnnnnnnnnnnnnnnnnnnnnnnnnnnnnnnnnnnnnnnnnnnnnnnnnnnnnnnnnnnnnnnnnnnnnnnnnnnnnnnnnnnnnnnnnnnnnnnnnnnnnnnnnnnnnnnnnnnnnnnnnnnnnnnnnnnnnnnnnnnnnnnnnnnnnnnnnnnnnnnnnnnnnnnnnnnnnnnnnnnnnnnnnnnnnnnnnnnnnnnnnnnnnnnnnnnnnnnnnnnnnnnnnnnnnnnnnnnnnnnnnnnnnnnnnnnnnnnnnnnnnnnnnnnnnnnnnnnnnnnnnnnnnnnnnnnnnnnnnnnnnnnnnnnnnnnnnnnnnnnnnnnnnnnnnnnnnnnnnnnnnnnnnnnnnnnnnnnnnnnnnnnnnnnnnnnnnnnnnnnnnnnnnnnnnnnnnnnnnnnnnnnnnnnnnnnnnnnnnnnnnnnnnnnnnnnnnnnnnnnnnnnnnnnnnnnnnnnnnnnnnnnnnnnnnnnnnnnnnnnnnnnnnnnnnnnnnnnnnnnnnnnnnnnnnnnnnnnnnnnnnnnnnnnnnnnnnnnnnnnnnnnnnnnnnnnnnnnnnnnnnnnnnnnnnnnnnnnnnnnnnnnnnnnnnnnnnnnnnnnnnnnnnnnnnnnnnnnnnnnnnnnnnnnnnnnnnnnnnnnnnnnnnnnnnnnnnnnnnnnnnnnnnnnnnnnnnnnnnnnnnnnnnnnnnnnnnnnnnnnnnnnnnnnnnnnnnnnnnnnnnnnnnnnnnnnnnnnnnnnnnnnnnnnnnnnnnnnnnnnnnnnnnnnnnnnnnnnnnnnnnnnnnnnnnnnnnnnnnnnnnnnnnnnnnnnnnnnnnnnnnnnnnnnnnnnnnnnnnnnnnnnnnnnnnnnnnnnnnnnnnnnnnnnnnnnnnnnnnnnnnnnnnnnnnnnnnnnnnnnnnnnnnnnnnnnnnnnnnnnnnnnnnnnnnnnnnnnnnnnnnnnnnnnnnnnnnnnnnnnnnnnnnnnnnnnnnnnnnnnnnnnnnnnnnnnnnnnnnnnnnnnnnnnnnnnnnnnnnnnnnnnnnnnnnnnnnnnnnnnnnnnnnnnnnnnnnnnnnnnnnnnnnnnnnnnnnnnnnnnnnnnnnnnnnnnnnnnnnnnnnnnnnnnnnnnnnnnnnnnnnnnnnnnnnnnnnnnnnnnnnnnnnnnnnnnnnnnnnnnnnnnnnnnnnnnnnnnnnnnnnnnnnnnnnnnnnnnnnnnnnnnnnnnnnnnnnnnnnnnnnnnnnnnnnnnnnnnnnnnnnnnnnnnnnnnnnnnnnnnnnnnnnnnnnnnnnnnnnnnnnnnnnnnnnnnnnnnnnnnnnnnnnnnnnnnnnnnnnnnnnnnnnnnnnnnnnnnnnnnnnnnnnnnnnnnnnnnnnnnnnnnnnnnnnnnnnnnnnnnnnnnnnnnnnnnnnnnnnnnnnnnnnnnnnnnnnnnnnnnnnnnnnnnnnnnnnnnnnnnnnnnnnnnnnnnnnnnnnnnnnnnnnnnnnnnnnnnnnnnnnnnnnnnnnnnnnnnnnnnnnnnnnnnnnnnnnnnnnnnnnnnnnnnnnnnnnnnnnnnnnnnnnnnnnnnnnnnnnnnnnnnnnnnnnnnnnnnnnnnnnnnnnnnnnnnnnnnnnnnnnnnnnnnnnnnnnnnnnnnnnnnnnnnnnnnnnnnnnnnnnnnnnnnnnnnnnnnnnnnnnnnnnnnnnnnnnnnnnnnnnnnnnnnnnnnnnnnnnnnnnnnnnnnnnnnnnnnnnnnnnnnnnnnnnnnnnnnnnnnnnnnnnnnnnnnnnnnnnnnnnnnnnnnnnnnnnnnnnnnnnnnnnnnnnnnnnnnnnnnnnnnnnnnnnnnnnnnnnnnnnnnnnnnnnnnnnnnnnnnnnnnnnnnnnnnnnnnnnnnnnnnnnnnnnnnnnnnnnnnnnnnnnnnnnnnnnnnnnnnnnnnnnnnnnnnnnnnnnnnnnnnnnnnnnnnnnnnnnnnnnnnnnnnnnnnnnnnnnnnnnnnnnnnnnnnnnnnnnnnnnnnnnnnnnnnnnnnnnnnnnnnnnnnnnnnnnnnnnnnnnnnnnnnnnnnnnnnnnnnnnnnnnnnnnnnnnnnnnnnnnnnnnnnnnnnnnnnnnnnnnnnnnnnnnnnnnnnnnnnnnnnnnnnnnnnnnnnnnnnnnnnnnnnnnnnnnnnnnnnnnnnnnnnnnnnnnnnnnnnnnnnnnnnnnnnnnnnnnnnnnnnnnnnnnnnnnnnnnnnnnnnnnnnnnnnnnnnnnnnnnnnnnnnnnnnnnnnnnnnnnnnnnnnnnnnnnnnnnnnnnnnnnnnnnnnnnnnnnnnnnnnnnnnnnnnnnnnnnnnnnnnnnnnnnnnnnnnnnnnnnnnnnnnnnnnnnnnnnnnnnnnnnnnnnnnnnnnnnnnnnnnnnnnnnnnnnnnnnnnnnnnnnnnnnnnnnnnnnnnnnnnnnnnnnnnnnnnnnnnnnnnnnnnnnnnnnnnnnnnnnnnnnnnnnnnnnnnnnnnnnnnnnnnnnnnnnnnnnnnnnnnnnnnnnnnnnnnnnnnnnnnnnnnnnnnnnnnnnnnnnnnnnnnnnnnnnnnnnnnnnnnnnnnnnnnnnnnnnnnnnnnnnnnnnnnnnnnnnnnnnnnnnnnnnnnnnnnnnnnnnnnnnnnnnnnnnnnnnnnnnnnnnnnnnnnnnnnnnnnnnnnnnnnnnnnnnnnnnnnnnnnnnnnnnnnnnnnnnnnnnnnnnnnnnnnnnnnnnnnnnnnnnnnnnnnnnnnnnnnnnnnnnnnnnnnnnnnnnnnnnnnnnnnnnnnnnnnnnnnnnnnnnnnnnnnnnnnnnnnnnnnnnnnnnnnnnnnnnnnnnnnnnnnnnnnnnnnnnnnnnnnnnnnnnnnnnnnnnnnnnnnnnnnnnnnnnnnnnnnnnnnnnnnnnnnnnnnnnnnnnnnnnnnnnnnnnnnnnnnnnnnnnnnnnnnnnnnnnnnnnnnnnnnnnnnnnnnnnnnnnnnnnnnnnnnnnnnnnnnnnnnnnnnnnnnnnnnnnnnnnnnnnnnnnnnnnnnnnnnnnnnnnnnnnnnnnnnnnnnnnnnnnnnnnnnnnnnnnnnnnnnnnnnnnnnnnnnnnnnnnnnnnnnnnnnnnnnnnnnnnnnnnnnnnnnnnnnnnnnnnnnnnnnnnnnnnnnnnnnnnnnnnnnnnnnnnnnnnnnnnnnnnnnnnnnnnnnnnnnnnnnnnnnnnnnnnnnnnnnnnnnnnnnnnnnnnnnnnnnnnnnnnnnnnnnnnnnnnnnnnnnnnnnnnnnnnnnnnnnnnnnnnnnnnnnnnnnnnnnnnnnnnnnnnnnnnnnnnnnnnnnnnnnnnnnnnnnnnnnnnnnnnnnnnnnnnnnnnnnnnnnnnnnnnnnnnnnnnnnnnnnnnnnnnnnnnnnnnnnnnnnnnnnnnnnnnnnnnnnnnnnnnnnnnnnnnnnnnnnnnnnnnnnnnnnnnnnnnnnnnnnnnnnnnnnnnnnnnnnnnnnnnnnnnnnnnnnnnnnnnnnnnnnnnnnnnnnnnnnnnnnnnnnnnnnnnnnnnnnnnnnnnnnnnnnnnnnnnnnnnnnnnnnnnnnnnnnnnnnnnnnnnnnnnnnnnnnnnnnnnnnnnnnnnnnnnnnnnnnnnnnnnnnnnnnnnnnnnnnnnnnnnnnnnnnnnnnnnnnnnnnnnnnnnnnnnnnnnnnnnnnnnnnnnnnnnnnnnnnnnnnnnnnnnnnnnnnnnnnnnnnnnnnnnnnnnnnnnnnnnnnnnnnnnnnnnnnnnnnnnnnnnnnnnnnnnnnnnnnnnnnnnnnnnnnnnnnnnnnnnnnnnnnnnnnnnnnnnnnnnnnnnnnnnnnnnnnnnnnnnnnnnnnnnnnnnnnnnnnnnnnnnnnnnnnnnnnnnnnnnnnnnnnnnnnnnnnnnnnnnnnnnnnnnnnnnnnnnnnnnnnnnnnnnnnnnnnnnnnnnnnnnnnnnnnnnnnnnnnnnnnnnnnnnnnnnnnnnnnnnnnnnnnnnnnnnnnnnnnnnnnnnnnnnnnnnnnnnnnnnnnnnnnnnnnnnnnnnnnnnnnnnnnnnnnnnnnnnnnnnnnnnnnnnnnnnnnnnnnnnnnnnnnnnnnnnnnnnnnnnnnnnnnnnnnnnnnnnnnnnnnnnnnnnnnnnnnnnnnnnnnnnnnnnnnnnnnnnnnnnnnnnnnnnnnnnnnnnnnnnnnnnnnnnnnnnnnnnnnnnnnnnnnnnnnnnnnnnnnnnnnnnnnnnnnnnnnnnnnnnnnnnnnnnnnnnnnnnnnnnnnnnnnnnnnnnnnnnnnnnnnnnnnnnnnnnnnnnnnnnnnnnnnnnnnnnnnnnnnnnnnnnnnnnnnnnnnnnnnnnnnnnnnnnnnnnnnnnnnnnnnnnnnnnnnnnnnnnnnnnnnnnnnnnnnnnnnnnnnnnnnnnnnnnnnnnnnnnnnnnnnnnnnnnnnnnnnnnnnnnnnnnnnnnnnnnnnnnnnnnnnnnnnnnnnnnnnnnnnnnnnnnnnnnnnnnnnnnnnnnnnnnnnnnnnnnnnnnnnnnnnnnnnnnnnnnnnnnnnnnnnnnnnnnnnnnnnnnnnnnnnnnnnnnnnnnnnnnnnnnnnnnnnnnnnnnnnnnnnnnnnnnnnnnnnnnnnnnnnnnnnnnnnnnnnnnnnnnnnnnnnnnnnnnnnnnnnnnnnnnnnnnnnnnnnnnnnnnnnnnnnnnnnnnnnnnnnnnnnnnnnnnnnnnnnnnnnnnnnnnnnnnnnnnnnnnnnnnnnnnnnnnnnnnnnnnnnnnnnnnnnnnnnnnnnnnnnnnnnnnnnnnnnnnnnnnnnnnnnnnnnnnnnnnnnnnnnnnnnnnnnnnnnnnnnnnnnnnnnnnnnnnnnnnnnnnnnnnnnnnnnnnnnnnnnnnnnnnnnnnnnnnnnnnnnnnnnnnnnnnnnnnnnnnnnnnnnnnnnnnnnnnnnnnnnnnnnnnnnnnnnnnnnnnnnnnnnnnnnnnnnnnnnnnnnnnnnnnnnnnnnnnnnnnnnnnnnnnnnnnnnnnnnnnnnnnnnnnnnnnnnnnnnnnnnnnnnnnnnnnnnnnnnnnnnnnnnnnnnnnnnnnnnnnnnnnnnnnnnnnnnnnnnnnnnnnnnnnnnnnnnnnnnnnnnnnnnnnnnnnnnnnnnnnnnnnnnnnnnnnnnnnnnnnnnnnnnnnnnnnnnnnnnnnnnnnnnnnnnnnnnnnnnnnnnnnnnnnnnnnnnnnnnnnnnnnnnnnnnnnnnnnnnnnnnnnnnnnnnnnnnnnnnnnnnnnnnnnnnnnnnnnnnnnnnnnnnnnnnnnnnnnnnnnnnnnnnnnnnnnnnnnnnnnnnnnnnnnnnnnnnnnnnnnnnnnnnnnnnnnnnnnnnnnnnnnnnnnnnnnnnnnnnnnnnnnnnnnnnnnnnnnnnnnnnnnnnnnnnnnnnnnnnnnnnnnnnnnnnnnnnnnnnnnnnnnnnnnnnnnnnnnnnnnnnnnnnnnnnnnnnnnnnnnnnnnnnnnnnnnnnnnnnnnnnnnnnnnnnnnnnnnnnnnnnnnnnnnnnnnnnnnnnnnnnnnnnnnnnnnnnnnnnnnnnnnnnnnnnnnnnnnnnnnnnnnnnnnnnnnnnnnnnnnnnnnnnnnnnnnnnnnnnnnnnnnnnnnnnnnnnnnnnnnnnnnnnnnnnnnnnnnnnnnnnnnnnnnnnnnnnnnnnnnnnnnnnnnnnnnnnnnnnnnnnnnnnnnnnnnnnnnnnnnnnnnnnnnnnnnnnnnnnnnnnnnnnnnnnnnnnnnnnnnnnnnnnnnnnnnnnnnnnnnnnnnnnnnnnnnnnnnnnnnnnnnnnnnnnnnnnnnnnnnnnnnnnnnnnnnnnnnnnnnnnnnnnnnnnnnnnnnnnnnnnnnnnnnnnnnnnnnnnnnnnnnnnnnnnnnnnnnnnnnnnnnnnnnnnnnnnnnnnnnnnnnnnnnnnnnnnnnnnnnnnnnnnnnnnnnnnnnnnnnnnnnnnnnnnnnnnnnnnnnnnnnnnnnnnnnnnnnnnnnnnnnnnnnnnnnnnnnnnnnnnnnnnnnnnnnnnnnnnnnnnnnnnnnnnnnnnnnnnnnnnnnnnnnnnnnnnnnnnnnnnnnnnnnnnnnnnnnnnnnnnnnnnnnnnnnnnnnnnnnnnnnnnnnnnnnnnnnnnnnnnnnnnnnnnnnnnnnnnnnnnnnnnnnnnnnnnnnnnnnnnnnnnnnnnnnnnnnnnnnnnnnnnnnnnnnnnnnnnnnnnnnnnnnnnnnnnnnnnnnnnnnnnnnnnnnnnnnnnnnnnnnnnnnnnnnnnnnnnnnnnnnnnnnnnnnnnnnnnnnnnnnnnnnnnnnnnnnnnnnnnnnnnnnnnnnnnnnnnnnnnnnnnnnnnnnnnnnnnnnnnnnnnnnnnnnnnnnnnnnnnnnnnnnnnnnnnnnnnnnnnnnnnnnnnnnnnnnnnnnnnnnnnnnnnnnnnnnnnnnnnnnnnnnnnnnnnnnnnnnnnnnnnnnnnnnnnnnnnnnnnnnnnnnnnnnnnnnnnnnnnnnnnnnnnnnnnnnnnnnnnnnnnnnnnnnnnnnnnnnnnnnnnnnnnnnnnnnnnnnnnnnnnnnnnnnnnnnnnnnnnnnnnnnnnnnnnnnnnnnnnnnnnnnnnnnnnnnnnnnnnnnnnnnnnnnnnnnnnnnnnnnnnnnnnnnnnnnnnnnnnnnnnnnnnnnnnnnnnnnnnnnnnnnnnnnnnnnnnnnnnnnnnnnnnnnnnnnnnnnnnnnnnnnnnnnnnnnnnnnnnnnnnnnnnnnnnnnnnnnnnnnnnnnnnnnnnnnnnnnnnnnnnnnnnnnnnnnnnnnnnnnnnnnnnnnnnnnnnnnnnnnnnnnnnnnnnnnnnnnnnnnnnnnnnnnnnnnnnnnnnnnnnnnnnnnnnnnnnnnnnnnnnnnnnnnnnnnnnnnnnnnnnnnnnnnnnnnnnnnnnnnnnnnnnnnnnnnnnnnnnnnnnnnnnnnnnnnnnnnnnnnnnnnnnnnnnnnnnnnnnnnnnnnnnnnnnnnnnnnnnnnnnnnnnnnnnnnnnnnnnnnnnnnnnnnnnnnnnnnnnnnnnnnnnnnnnnnnnnnnnnnnnnnnnnnnnnnnnnnnnnnnnnnnnnnnnnnnnnnnnnnnnnnnnnnnnnnnnnnnnnnnnnnnnnnnnnnnnnnnnnnnnnnnnnnnnnnnnnnnnnnnnnnnnnnnnnnnnnnnnnnnnnnnnnnnnnnnnnnnnnnnnnnnnnnnnnnnnnnnnnnnnnnnnnnnnnnnnnnnnnnnnnnnnnnnnnnnnnnnnnnnnnnnnnnnnnnnnnnnnnnnnnnnnnnnnnnnnnnnnnnnnnnnnnnnnnnnnnnnnnnnnnnnnnnnnnnnnnnnnnnnnnnnnnnnnnnnnnnnnnnnnnnnnnnnnnnnnnnnnnnnnnnnnnnnnnnnnnnnnnnnnnnnnnnnnnnnnnnnnnnnnnnnnnnnnnnnnnnnnnnnnnnnnnnnnnnnnnnnnnnnnnnnnnnnnnnnnnnnnnnnnnnnnnnnnnnnnnnnnnnnnnnnnnnnnnnnnnnnnnnnnnnnnnnnnnnnnnnnnnnnnnnnnnnnnnnnnnnnnnnnnnnnnnnnnnnnnnnnnnnnnnnnnnnnnnnnnnnnnnnnnnnnnnnnnnnnnnnnnnnnnnnnnnnnnnnnnnnnnnnnnnnnnnnnnnnnnnnnnnnnnnnnnnnnnnnnnnnnnnnnnnnnnnnnnnnnnnnnnnnnnnnnnnnnnnnnnnnnnnnnnnnnnnnnnnnnnnnnnnnnnnnnnnnnnnnnnnnnnnnnnnnnnnnnnnnnnnnnnnnnnnnnnnnnnnnnnnnnnnnnnnnnnnnnnnnnnnnnnnnnnnnnnnnnnnnnnnnnnnnnnnnnnnnnnnnnnnnnnnnnnnnnnnnnnnnnnnnnnnnnnnnnnnnnnnnnnnnnnnnnnnnnnnnnnnnnnnnnnnnnnnnnnnnnnnnnnnnnnnnnnnnnnnnnnnnnnnnnnnnnnnnnnnnnnnnnnnnnnnnnnnnnnnnnnnnnnnnnnnnnnnnnnnnnnnnnnnnnnnnnnnnnnnnnnnnnnnnnnnnnnnnnnnnnnnnnnnnnnnnnnnnnnnnnnnnnnnnnnnnnnnnnnnnnnnnnnnnnnnnnnnnnnnnnnnnnnnnnnnnnnnnnnnnnnnnnnnnnnnnnnnnnnnnnnnnnnnnnnnnnnnnnnnnnnnnnnnnnnnnnnnnnnnnnnnnnnnnnnnnnnnnnnnnnnnnnnnnnnnnnnnnnnnnnnnnnnnnnnnnnnnnnnnnnnnnnnnnnnnnnnnnnnnnnnnnnnnnnnnnnnnnnnnnnnnnnnnnnnnnnnnnnnnnnnnnnnnnnnnnnnnnnnnnnnnnnnnnnnnnnnnnnnnnnnnnnnnnnnnnnnnnnnnnnnnnnnnnnnnnnnnnnnnnnnnnnnnnnnnnnnnnnnnnnnnnnnnnnnnnnnnnnnnnnnnnnnnnnnnnnnnnnnnnnnnnnnnnnnnnnnnnnnnnnnnnnnnnnnnnnnnnnnnnnnnnnnnnnnnnnnnnnnnnnnnnnnnnnnnnnnnnnnnnnnnnnnnnnnnnnnnnnnnnnnnnnnnnnnnnnnnnnnnnnnnnnnnnnnnnnnnnnnnnnnnnnnnnnnnnnnnnnnnnnnnnnnnnnnnnnnnnnnnnnnnnnnnnnnnnnnnnnnnnnnnnnnnnnnnnnnnnnnnnnnnnnnnnnnnnnnnnnnnnnnnnnnnnnnnnnnnnnnnnnnnnnnnnnnnnnnnnnnnnnnnnnnnnnnnnnnnnnnnnnnnnnnnnnnnnnnnnnnnnnnnnnnnnnnnnnnnnnnnnnnnnnnnnnnnnnnnnnnnnnnnnnnnnnnnnnnnnnnnnnnnnnnnnnnnnnnnnnnnnnnnnnnnnnnnnnnnnnnnnnnnnnnnnnnnnnnnnnnnnnnnnnnnnnnnnnnnnnnnnnnnnnnnnnnnnnnnnnnnnnnnnnnnnnnnnnnnnnnnnnnnnnnnnnnnnnnnnnnnnnnnnnnnnnnnnnnnnnnnnnnnnnnnnnnnnnnnnnnnnnnnnnnnnnnnnnnnnnnnnnnnnnnnnnnnnnnnnnnnnnnnnnnnnnnnnnnnnnnnnnnnnnnnnnnnnnnnnnnnnnnnnnnnnnnnnnnnnnnnnnnnnnnnnnnnnnnnnnnnnnnnnnnnnnnnnnnnnnnnnnnnnnnnnnnnnnnnnnnnnnnnnnnnnnnnnnnnnnnnnnnnnnnnnnnnnnnnnnnnnnnnnnnnnnnnnnnnnnnnnnnnnnnnnnnnnnnnnnnnnnnnnnnnnnnnnnnnnnnnnnnnnnnnnnnnnnnnnnnnnnnnnnnnnnnnnnnnnnnnnnnnnnnnnnnnnnnnnnnnnnnnnnnnnnnnnnnnnnnnnnnnnnnnnnnnnnnnnnnnnnnnnnnnnnnnnnnnnnnnnnnnnnnnnnnnnnnnnnnnnnnnnnnnnnnnnnnnnnnnnnnnnnnnnnnnnnnnnnnnnnnnnnnnnnnnnnnnnnnnnnnnnnnnnnnnnnnnnnnnnnnnnnnnnnnnnnnnnnnnnnnnnnnnnnnnnnnnnnnnnnnnnnnnnnnnnnnnnnnnnnnnnnnnnnnnnnnnnnnnnnnnnnnnnnnnnnnnnnnnnnnnnnnnnnnnnnnnnnnnnnnnnnnnnnnnnnnnnnnnnnnnnnnnnnnnnnnnnnnnnnnnnnnnnnnnnnnnnnnnnnnnnnnnnnnnnnnnnnnnnnnnnnnnnnnnnnnnnnnnnnnnnnnnnnnnnnnnnnnnnnnnnnnnnnnnnnnnnnnnnnnnnnnnnnnnnnnnnnnnnnnnnnnnnnnnnnnnnnnnnnnnnnnnnnnnnnnnnnnnnnnnnnnnnnnnnnnnnnnnnnnnnnnnnnnnnnnnnnnnnnnnnnnnnnnnnnnnnnnnnnnnnnnnnnnnnnnnnnnnnnnnnnnnnnnnnnnnnnnnnnnnnnnnnnnnnnnnnnnnnnnnnnnnnnnnnnnnnnnnnnnnnnnnnnnnnnnnnnnnnnnnnnnnnnnnnnnnnnnnnnnnnnnnnnnnnnnnnnnnnnnnnnnnnnnnnnnnnnnnnnnnnnnnnnnnnnnnnnnnnnnnnnnnnnnnnnnnnnnnnnnnnnnnnnnnnnnnnnnnnnnnnnnnnnnnnnnnnnnnnnnnnnnnnnnnnnnnnnnnnnnnnnnnnnnnnnnnnnnnnnnnnnnnnnnnnnnnnnnnnnnnnnnnnnnnnnnnnnnnnnnnnnnnnnnnnnnnnnnnnnnnnnnnnnnnnnnnnnnnnnnnnnnnnnnnnnnnnnnnnnnnnnnnnnnnnnnnnnnnnnnnnnnnnnnnnnnnnnnnnnnnnnnnnnnnnnnnnnnnnnnnnnnnnnnnnnnnnnnnnnnnnnnnnnnnnnnnnnnnnnnnnnnnnnnnnnnnnnnnnnnnnnnnnnnnnnnnnnnnnnnnnnnnnnnnnnnnnnnnnnnnnnnnnnnnnnnnnnnnnnnnnnnnnnnnnnnnnnnnnnnnnnnnnnnnnnnnnnnnnnnnnnnnnnnnnnnnnnnnnnnnnnnnnnnnnnnnnnnnnnnnnnnnnnnnnnnnnnnnnnnnnnnnnnnnnnnnnnnnnnnnnnnnnnnnnnnnnnnnnnnnnnnnnnnnnnnnnnnnnnnnnnnnnnnnnnnnnnnnnnnnnnnnnnnnnnnnnnnnnnnnnnnnnnnnnnnnnnnnnnnnnnnnnnnnnnnnnnnnnnnnnnnnnnnnnnnnnnnnnnnnnnnnnnnnnnnnnnnnnnnnnnnnnnnnnnnnnnnnnnnnnnnnnnnnnnnnnnnnnnnnnnnnnnnnnnnnnnnnnnnnnnnnnnnnnnnnnnnnnnnnnnnnnnnnnnnnnnnnnnnnnnnnnnnnnnnnnnnnnnnnnnnnnnnnnnnnnnnnnnnnnnnnnnnnnnnnnnnnnnnnnnnnnnnnnnnnnnnnnnnnnnnnnnnnnnnnnnnnnnnnnnnnnnnnnnnnnnnnnnnnnnnnnnnnnnnnnnnnnnnnnnnnnnnnnnnnnnnnnnnnnnnnnnnnnnnnnnnnnnnnnnnnnnnnnnnnnnnnnnnnnnnnnnnnnnnnnnnnnnnnnnnnnnnnnnnnnnnnnnnnnnnnnnnnnnnnnnnnnnnnnnnnnnnnnnnnnnnnnnnnnnnnnnnnnnnnnnnnnnnnnnnnnnnnnnnnnnnnnnnnnnnnnnnnnnnnnnnnnnnnnnnnnnnnnnnnnnnnnnnnnnnnnnnnnnnnnnnnnnnnnnnnnnnnnnnnnnnnnnnnnnnnnnnnnnnnnnnnnnnnnnnnnnnnnnnnnnnnnnnnnnnnnnnnnnnnnnnnnnnnnnnnnnnnnnnnnnnnnnnnnnnnnnnnnnnnnnnnnnnnnnnnnnnnnnnnnnnnnnnnnnnnnnnnnnnnnnnnnnnnnnnnnnnnnnnnnnnnnnnnnnnnnnnnnnnnnnnnnnnnnnnnnnnnnnnnnnnnnnnnnnnnnnnnnnnnnnnnnnnnnnnnnnnnnnnnnnnnnnnnnnnnnnnnnnnnnnnnnnnnnnnnnnnnnnnnnnnnnnnnnnnnnnnnnnnnnnnnnnnnnnnnnnnnnnnnnnnnnnnnnnnnnnnnnnnnnnnnnnnnnnnnnnnnnnnnnnnnnnnnnnnnnnnnnnnnnnnnnnnnnnnnnnnnnnnnnnnnnnnnnnnnnnnnnnnnnnnnnnnnnnnnnnnnnnnnnnnnnnnnnnnnnnnnnnnnnnnnnnnnnnnnnnnnnnnnnnnnnnnnnnnnnnnnnnnnnnnnnnnnnnnnnnnnnnnnnnnnnnnnnnnnnnnnnnnnnnnnnnnnnnnnnnnnnnnnnnnnnnnnnnnnnnnnnnnnnnnnnnnnnnnnnnnnnnnnnnnnnnnnnnnnnnnnnnnnnnnnnnnnnnnnnnnnnnnnnnnnnnnnnnnnnnnnnnnnnnnnnnnnnnnnnnnnnnnnnnnnnnnnnnnnnnnnnnnnnnnnnnnnnnnnnnnnnnnnnnnnnnnnnnnnnnnnnnnnnnnnnnnnnnnnnnnnnnnnnnnnnnnnnnnnnnnnnnnnnnnnnnnnnnnnnnnnnnnnnnnnnnnnnnnnnnnnnnnnnnnnnnnnnnnnnnnnnnnnnnnnnnnnnnnnnnnnnnnnnnnnnnnnnnnnnnnnnnnnnnnnnnnnnnnnnnnnnnnnnnnnnnnnnnnnnnnnnnnnnnnnnnnnnnnnnnnnnnnnnnnnnnnnnnnnnnnnnnnnnnnnnnnnnnnnnnnnnnnnnnnnnnnnnnnnnnnnnnnnnnnnnnnnnnnnnnnnnnnnnnnnnnnnnnnnnnnnnnnnnnnnnnnnnnnnnnnnnnnnnnnnnnnnnnnnnnnnnnnnnnnnnnnnnnnnnnnnnnnnnnnnnnnnnnnnnnnnnnnnnnnnnnnnnnnnnnnnnnnnnnnnnnnnnnnnnnnnnnnnnnnnnnnnnnnnnnnnnnnnnnnnnnnnnnnnnnnnnnnnnnnnnnnnnnnnnnnnnnnnnnnnnnnnnnnnnnnnnnnnnnnnnnnnnnnnnnnnnnnnnnnnnnnnnnnnnnnnnnnnnnnnnnnnnnnnnnnnnnnnnnnnnnnnnnnnnnnnnnnnnnnnnnnnnnnnnnnnnnnnnnnnnnnnnnnnnnnnnnnnnnnnnnnnnnnnnnnnnnnnnnnnnnnnnnnnnnnnnnnnnnnnnnnnnnnnnnnnnnnnnnnnnnnnnnnnnnnnnnnnnnnnnnnnnnnnnnnnnnnnnnnnnnnnnnnnnnnnnnnnnnnnnnnnnnnnnnnnnnnnnnnnnnnnnnnnnnnnnnnnnnnnnnnnnnnnnnnnnnnnnnnnnnnnnnnnnnnnnnnnnnnnnnnnnnnnnnnnnnnnnnnnnnnnnnnnnnnnnnnnnnnnnnnnnnnnnnnnnnnnnnnnnnnnnnnnnnnnnnnnnnnnnnnnnnnnnnnnnnnnnnnnnnnnnnnnnnnnnnnnnnnnnnnnnnnnnnnnnnnnnnnnnnnnnnnnnnnnnnnnnnnnnnnnnnnnnnnnnnnnnnnnnnnnnnnnnnnnnnnnnnnnnnnnnnnnnnnnnnnnnnnnnnnnnnnnnnnnnnnnnnnnnnnnnnnnnnnnnnnnnnnnnnnnnnnnnnnnnnnnnnnnnnnnnnnnnnnnnnnnnnnnnnnnnnnnnnnnnnnnnnnnnnnnnnnnnnnnnnnnnnnnnnnnnnnnnnnnnnnnnnnnnnnnnnnnnnnnnnnnnnnnnnnnnnnnnnnnnnnnnnnnnnnnnnnnnnnnnnnnnnnnnnnnnnnnnnnnnnnnnnnnnnnnnnnnnnnnnnnnnnnnnnnnnnnnnnnnnnnnnnnnnnnnnnnnnnnnnnnnnnnnnnnnnnnnnnnnnnnnnnnnnnnnnnnnnnnnnnnnnnnnnnnnnnnnnnnnnnnnnnnnnnnnnnnnnnnnnnnnnnnnnnnnnnnnnnnnnnnnnnnnnnnnnnnnnnnnnnnnnnnnnnnnnnnnnnnnnnnnnnnnnnnnnnnnnnnnnnnnnnnnnnnnnnnnnnnnnnnnnnnnnnnnnnnnnnnnnnnnnnnnnnnnnnnnnnnnnnnnnnnnnnnnnnnnnnnnnnnnnnnnnnnnnnnnnnnnnnnnnnnnnnnnnnnnnnnnnnnnnnnnnnnnnnnnnnnnnnnnnnnnnnnnnnnnnnnnnnnnnnnnnnnnnnnnnnnnnnnnnnnnnnnnnnnnnnnnnnnnnnnnnnnnnnnnnnnnnnnnnnnnnnnnnnnnnnnnnnnnnnnnnnnnnnnnnnnnnnnnnnnnnnnnnnnnnnnnnnnnnnnnnnnnnnnnnnnnnnnnnnnnnnnnnnnnnnnnnnnnnnnnnnnnnnnnnnnnnnnnnnnnnnnnnnnnnnnnnnnnnnnnnnnnnnnnnnnnnnnnnnnnnnnnnnnnnnnnnnnnnnnnnnnnnnnnnnnnnnnnnnnnnnnnnnnnnnnnnnnnnnnnnnnnnnnnnnnnnnnnnnnnnnnnnnnnnnnnnnnnnnnnnnnnnnnnnnnnnnnnnnnnnnnnnnnnnnnnnnnnnnnnnnnnnnnnnnnnnnnnnnnnnnnnnnnnnnnnnnnnnnnnnnnnnnnnnnnnnnnnnnnnnnnnnnnnnnnnnnnnnnnnnnnnnnnnnnnnnnnnnnnnnnnnnnnnnnnnnnnnnnnnnnnnnnnnnnnnnnnnnnnnnnnnnnnnnnnnnnnnnnnnnnnnnnnnnnnnnnnnnnnnnnnnnnnnnnnnnnnnnnnnnnnnnnnnnnnnnnnnnnnnnnnnnnnnnnnnnnnnnnnnnnnnnnnnnnnnnnnnnnnnnnnnnnnnnnnnnnnnnnnnnnnnnnnnnnnnnnnnnnnnnnnnnnnnnnnnnnnnnnnnnnnnnnnnnnnnnnnnnnnnnnnnnnnnnnnnnnnnnnnnnnnnnnnnnnnnnnnnnnnnnnnnnnnnnnnnnnnnnnnnnnnnnnnnnnnnnnnnnnnnnnnnnnnnnnnnnnnnnnnnnnnnnnnnnnnnnnnnnnnnnnnnnnnnnnnnnnnnnnnnnnnnnnnnnnnnnnnnnnnnnnnnnnnnnnnnnnnnnnnnnnnnnnnnnnnnnnnnnnnnnnnnnnnnnnnnnnnnnnnnnnnnnnnnnnnnnnnnnnnnnnnnnnnnnnnnnnnnnnnnnnnnnnnnnnnnnnnnnnnnnnnnnnnnnnnnnnnnnnnnnnnnnnnnnnnnnnnnnnnnnnnnnnnnnnnnnnnnnnnnnnnnnnnnnnnnnnnnnnnnnnnnnnnnnnnnnnnnnnnnnnnnnnnnnnnnnnnnnnnnnnnnnnnnnnnnnnnnnnnnnnnnnnnnnnnnnnnnnnnnnnnnnnnnnnnnnnnnnnnnnnnnnnnnnnnnnnnnnnnnnnnnnnnnnnnnnnnnnnnnnnnnnnnnnnnnnnnnnnnnnnnnnnnnnnnnnnnnnnnnnnnnnnnnnnnnnnnnnnnnnnnnnnnnnnnnnnnnnnnnnnnnnnnnnnnnnnnnnnnnnnnnnnnnnnnnnnnnnnnnnnnnnnnnnnnnnnnnnnnnnnnnnnnnnnnnnnnnnnnnnnnnnnnnnnnnnnnnnnnnnnnnnnnnnnnnnnnnnnnnnnnnnnnnnnnnnnnnnnnnnnnnnnnnnnnnnnnnnnnnnnnnnnnnnnnnnnnnnnnnnnnnnnnnnnnnnnnnnnnnnnnnnnnnnnnnnnnnnnnnnnnnnnnnnnnnnnnnnnnnnnnnnnnnnnnnnnnnnnnnnnnnnnnnnnnnnnnnnnnnnnnnnnnnnnnnnnnnnnnnnnnnnnnnnnnnnnnnnnnnnnnnnnnnnnnnnnnnnnnnnnnnnnnnnnnnnnnnnnnnnnnnnnnnnnnnnnnnnnnnnnnnnnnnnnnnnnnnnnnnnnnnnnnnnnnnnnnnnnnnnnnnnnnnnnnnnnnnnnnnnnnnnnnnnnnnnnnnnnnnnnnnnnnnnnnnnnnnnnnnnnnnnnnnnnnnnnnnnnnnnnnnnnnnnnnnnnnnnnnnnnnnnnnnnnnnnnnnnnnnnnnnnnnnnnnnnnnnnnnnnnnnnnnnnnnnnnnnnnnnnnnnnnnnnnnnnnnnnnnnnnnnnnnnnnnnnnnnnnnnnnnnnnnnnnnnnnnnnnnnnnnnnnnnnnnnnnnnnnnnnnnnnnnnnnnnnnnnnnnnnnnnnnnnnnnnnnnnnnnnnnnnnnnnnnnnnnnnnnnnnnnnnnnnnnnnnnnnnnnnnnnnnnnnnnnnnnnnnnnnnnnnnnnnnnnnnnnnnnnnnnnnnnnnnnnnnnnnnnnnnnnnnnnnnnnnnnnnnnnnnnnnnnnnnnnnnnnnnnnnnnnnnnnnnnnnnnnnnnnnnnnnnnnnnnnnnnnnnnnnnnnnnnnnnnnnnnnnnnnnnnnnnnnnnnnnnnnnnnnnnnnnnnnnnnnnnnnnnnnnnnnnnnnnnnnnnnnnnnnnnnnnnnnnnnnnnnnnnnnnnnnnnnnnnnnnnnnnnnnnnnnnnnnnnnnnnnnnnnnnnnnnnnnnnnnnnnnnnnnnnnnnnnnnnnnnnnnnnnnnnnnnnnnnnnnnnnnnnnnnnnnnnnnnnnnnnnnnnnnnnnnnnnnnnnnnnnnnnnnnnnnnnnnnnnnnnnnnnnnnnnnnnnnnnnnnnnnnnnnnnnnnnnnnnnnnnnnnnnnnnnnnnnnnnnnnnnnnnnnnnnnnnnnnnnnnnnnnnnnnnnnnnnnnnnnnnnnnnnnnnnnnnnnnnnnnnnnnnnnnnnnnnnnnnnnnnnnnnnnnnnnnnnnnnnnnnnnnnnnnnnnnnnnnnnnnnnnnnnnnnnnnnnnnnnnnnnnnnnnnnnnnnnnnnnnnnnnnnnnnnnnnnnnnnnnnnnnnnnnnnnnnnnnnnnnnnnnnnnnnnnnnnnnnnnnnnnnnnnnnnnnnnnnnnnnnnnnnnnnnnnnnnnnnnnnnnnnnnnnnnnnnnnnnnnnnnnnnnnnnnnnnnnnnnnnnnnnnnnnnnnnnnnnnnnnnnnnnnnnnnnnnnnnnnnnnnnnnnnnnnnnnnnnnnnnnnnnnnnnnnnnnnnnnnnnnnnnnnnnnnnnnnnnnnnnnnnnnnnnnnnnnnnnnnnnnnnnnnnnnnnnnnnnnnnnnnnnnnnnnnnnnnnnnnnnnnnnnnnnnnnnnnnnnnnnnnnnnnnnnnnnnnnnnnnnnnnnnnnnnnnnnnnnnnnnnnnnnnnnnnnnnnnnnnnnnnnnnnnnnnnnnnnnnnnnnnnnnnnnnnnnnnnnnnnnnnnnnnnnnnnnnnnnnnnnnnnnnnnnnnnnnnnnnnnnnnnnnnnnnnnnnnnnnnnnnnnnnnnnnnnnnnnnnnnnnnnnnnnnnnnnnnnnnnnnnnnnnnnnnnnnnnnnnnnnnnnnnnnnnnnnnnnnnnnnnnnnnnnnnnnnnnnnnnnnnnnnnnnnnnnnnnnnnnnnnnnnnnnnnnnnnnnnnnnnnnnnnnnnnnnnnnnnnnnnnnnnnnnnnnnnnnnnnnnnnnnnnnnnnnnnnnnnnnnnnnnnnnnnnnnnnnnnnnnnnnnnnnnnnnnnnnnnnnnnnnnnnnnnnnnnnnnnnnnnnnnnnnnnnnnnnnnnnnnnnnnnnnnnnnnnnnnnnnnnnnnnnnnnnnnnnnnnnnnnnnnnnnnnnnnnnnnnnnnnnnnnnnnnnnnnnnnnnnnnnnnnnnnnnnnnnnnnnnnnnnnnnnnnnnnnnnnnnnnnnnnnnnnnnnnnnnnnnnnnnnnnnnnnnnnnnnnnnnnnnnnnnnnnnnnnnnnnnnnnnnnnnnnnnnnnnnnnnnnnnnnnnnnnnnnnnnnnnnnnnnnnnnnnnnnnnnnnnnnnnnnnnnnnnnnnnnnnnnnnnnnnnnnnnnnnnnnnnnnnnnnnnnnnnnnnnnnnnnnnnnnnnnnnnnnnnnnnnnnnnnnnnnnnnnnnnnnnnnnnnnnnnnnnnnnnnnnnnnnnnnnnnnnnnnnnnnnnnnnnnnnnnnnnnnnnnnnnnnnnnnnnnnnnnnnnnnnnnnnnnnnnnnnnnnnnnnnnnnnnnnnnnnnnnnnnnnnnnnnnnnnnnnnnnnnnnnnnnnnnnnnnnnnnnnnnnnnnnnnnnnnnnnnnnnnnnnnnnnnnnnnnnnnnnnnnnnnnnnnnnnnnnnnnnnnnnnnnnnnnnnnnnnnnnnnnnnnnnnnnnnnnnnnnnnnnnnnnnnnnnnnnnnnnnnnnnnnnnnnnnnnnnnnnnnnnnnnnnnnnnnnnnnnnnnnnnnnnnnnnnnnnnnnnnnnnnnnnnnnnnnnnnnnnnnnnnnnnnnnnnnnnnnnnnnnnnnnnnnnnnnnnnnnnnnnnnnnnnnnnnnnnnnnnnnnnnnnnnnnnnnnnnnnnnnnnnnnnnnnnnnnnnnnnnnnnnnnnnnnnnnnnnnnnnnnnnnnnnnnnnnnnnnnnnnnnnnnnnnnnnnnnnnnnnnnnnnnnnnnnnnnnnnnnnnnnnnnnnnnnnnnnnnnnnnnnnnnnnnnnnnnnnnnnnnnnnnnnnnnnnnnnnnnnnnnnnnnnnnnnnnnnnnnnnnnnnnnnnnnnnnnnnnnnnnnnnnnnnnnnnnnnnnnnnnnnnnnnnnnnnnnnnnnnnnnnnnnnnnnnnnnnnnnnnnnnnnnnnnnnnnnnnnnnnnnnnnnnnnnnnnnnnnnnnnnnnnnnnnnnnnnnnnnnnnnnnnnnnnnnnnnnnnnnnnnnnnnnnnnnnnnnnnnnnnnnnnnnnnnnnnnnnnnnnnnnnnnnnnnnnnnnnnnnnnnnnnnnnnnnnnnnnnnnnnnnnnnnnnnnnnnnnnnnnnnnnnnnnnnnnnnnnnnnnnnnnnnnnnnnnnnnnnnnnnnnnnnnnnnnnnnnnnnnnnnnnnnnnnnnnnnnnnnnnnnnnnnnnnnnnnnnnnnnnnnnnnnnnnnnnnnnnnnnnnnnnnnnnnnnnnnnnnnnnnnnnnnnnnnnnnnnnnnnnnnnnnnnnnnnnnnnnnnnnnnnnnnnnnnnnnnnnnnnnnnnnnnnnnnnnnnnnnnnnnnnnnnnnnnnnnnnnnnnnnnnnnnnnnnnnnnnnnnnnnnnnnnnnnnnnnnnnnnnnnnnnnnnnnnnnnnnnnnnnnnnnnnnnnnnnnnnnnnnnnnnnnnnnnnnnnnnnnnnnnnnnnnnnnnnnnnnnnnnnnnnnnnnnnnnnnnnnnnnnnnnnnnnnnnnnnnnnnnnnnnnnnnnnnnnnnnnnnnnnnnnnnnnnnnnnnnnnnnnnnnnnnnnnnnnnnnnnnnnnnnnnnnnnnnnnnnnnnnnnnnnnnnnnnnnnnnnnnnnnnnnnnnnnnnnnnnnnnnnnnnnnnnnnnnnnnnnnnnnnnnnnnnnnnnnnnnnnnnnnnnnnnnnnnnnnnnnnnnnnnnnnnnnnnnnnnnnnnnnnnnnnnnnnnnnnnnnnnnnnnnnnnnnnnnnnnnnnnnnnnnnnnnnnnnnnnnnnnnnnnnnnnnnnnnnnnnnnnnnnnnnnnnnnnnnnnnnnnnnnnnnnnnnnnnnnnnnnnnnnnnnnnnnnnnnnnnnnnnnnnnnnnnnnnnnnnnnnnnnnnnnnnnnnnnnnnnnnnnnnnnnnnnnnnnnnnnnnnnnnnnnnnnnnnnnnnnnnnnnnnnnnnnnnnnnnnnnnnnnnnnnnnnnnnnnnnnnnnnnnnnnnnnnnnnnnnnnnnnnnnnnnnnnnnnnnnnnnnnnnnnnnnnnnnnnnnnnnnnnnnnnnnnnnnnnnnnnnnnnnnnnnnnnnnnnnnnnnnnnnnnnnnnnnnnnnnnnnnnnnnnnnnnnnnnnnnnnnnnnnnnnnnnnnnnnnnnnnnnnnnnnnnnnnnnnnnnnnnnnnnnnnnnnnnnnnnnnnnnnnnnnnnnnnnnnnnnnnnnnnnnnnnnnnnnnnnnnnnnnnnnnnnnnnnnnnnnnnnnnnnnnnnnnnnnnnnnnnnnnnnnnnnnnnnnnnnnnnnnnnnnnnnnnnnnnnnnnnnnnnnnnnnnnnnnnnnnnnnnnnnnnnnnnnnnnnnnnnnnnnnnnnnnnnnnnnnnnnnnnnnnnnnnnnnnnnnnnnnnnnnnnnnnnnnnnnnnnnnnnnnnnnnnnnnnnnnnnnnnnnnnnnnnnnnnnnnnnnnnnnnnnnnnnnnnnnnnnnnnnnnnnnnnnnnnnnnnnnnnnnnnnnnnnnnnnnnnnnnnnnnnnnnnnnnnnnnnnnnnnnnnnnnnnnnnnnnnnnnnnnnnnnnnnnnnnnnnnnnnnnnnnnnnnnnnnnnnnnnnnnnnnnnnnnnnnnnnnnnnnnnnnnnnnnnnnnnnnnnnnnnnnnnnnnnnnnnnnnnnnnnnnnnnnnnnnnnnnnnnnnnnnnnnnnnnnnnnnnnnnnnnnnnnnnnnnnnnnnnnnnnnnnnnnnnnnnnnnnnnnnnnnnnnnnnnnnnnnnnnnnnnnnnnnnnnnnnnnnnnnnnnnnnnnnnnnnnnnnnnnnnnnnnnnnnnnnnnnnnnnnnnnnnnnnnnnnnnnnnnnnnnnnnnnnnnnnnnnnnnnnnnnnnnnnnnnnnnnnnnnnnnnnnnnnnnnnnnnnnnnnnnnnnnnnnnnnnnnnnnnnnnnnnnnnnnnnnnnnnnnnnnnnnnnnnnnnnnnnnnnnnnnnnnnnnnnnnnnnnnnnnnnnnnnnnnnnnnnnnnnnnnnnnnnnnnnnnnnnnnnnnnnnnnnnnnnnnnnnnnnnnnnnnnnnnnnnnnnnnnnnnnnnnnnnnnnnnnnnnnnnnnnnnnnnnnnnnnnnnnnnnnnnnnnnnnnnnnnnnnnnnnnnnnnnnnnnnnnnnnnnnnnnnnnnnnnnnnnnnnnnnnnnnnnnnnnnnnnnnnnnnnnnnnnnnnnnnnnnnnnnnnnnnnnnnnnnnnnnnnnnnnnnnnnnnnnnnnnnnnnnnnnnnnnnnnnnnnnnnnnnnnnnnnnnnnnnnnnnnnnnnnnnnnnnnnnnnnnnnnnnnnnnnnnnnnnnnnnnnnnnnnnnnnnnnnnnnnnnnnnnnnnnnnnnnnnnnnnnnnnnnnnnnnnnnnnnnnnnnnnnnnnnnnnnnnnnnnnnnnnnnnnnnnnnnnnnnnnnnnnnnnnnnnnnnnnnnnnnnnnnnnnnnnnnnnnnnnnnnnnnnnnnnnnnnnnnnnnnnnnnnnnnnnnnnnnnnnnnnnnnnnnnnnnnnnnnnnnnnnnnnnnnnnnnnnnnnnnnnnnnnnnnnnnnnnnnnnnnnnnnnnnnnnnnnnnnnnnnnnnnnnnnnnnnnnnnnnnnnnnnnnnnnnnnnnnnnnnnnnnnnnnnnnnnnnnnnnnnnnnnnnnnnnnnnnnnnnnnnnnnnnnnnnnnnnnnnnnnnnnnnnnnnnnnnnnnnnnnnnnnnnnnnnnnnnnnnnnnnnnnnnnnnnnnnnnnnnnnnnnnnnnnnnnnnnnnnnnnnnnnnnnnnnnnnnnnnnnnnnnnnnnnnnnnnnnnnnnnnnnnnnnnnnnnnnnnnnnnnnnnnnnnnnnnnnnnnnnnnnnnnnnnnnnnnnnnnnnnnnnnnnnnnnnnnnnnnnnnnnnnnnnnnnnnnnnnnnnnnnnnnnnnnnnnnnnnnnnnnnnnnnnnnnnnnnnnnnnnnnnnnnnnnnnnnnnnnnnnnnnnnnnnnnnnnnnnnnnnnnnnnnnnnnnnnnnnnnnnnnnnnnnnnnnnnnnnnnnnnnnnnnnnnnnnnnnnnnnnnnnnnnnnnnnnnnnnnnnnnnnnnnnnnnnnnnnnnnnnnnnnnnnnnnnnnnnnnnnnnnnnnnnnnnnnnnnnnnnnnnnnnnnnnnnnnnnnnnnnnnnnnnnnnnnnnnnnnnnnnnnnnnnnnnnnnnnnnnnnnnnnnnnnnnnnnnnnnnnnnnnnnnnnnnnnnnnnnnnnnnnnnnnnnnnnnnnnnnnnnnnnnnnnnnnnnnnnnnnnnnnnnnnnnnnnnnnnnnnnnnnnnnnnnnnnnnnnnnnnnnnnnnnnnnnnnnnnnnnnnnnnnnnnnnnnnnnnnnnnnnnnnnnnnnnnnnnnnnnnnnnnnnnnnnnnnnnnnnnnnnnnnnnnnnnnnnnnnnnnnnnnnnnnnnnnnnnnnnnnnnnnnnnnnnnnnnnnnnnnnnnnnnnnnnnnnnnnnnnnnnnnnnnnnnnnnnnnnnnnnnnnnnnnnnnnnnnnnnnnnnnnnnnnnnnnnnnnnnnnnnnnnnnnnnnnnnnnnnnnnnnnnnnnnnnnnnnnnnnnnnnnnnnnnnnnnnnnnnnnnnnnnnnnnnnnnnnnnnnnnnnnnnnnnnnnnnnnnnnnnnnnnnnnnnnnnnnnnnnnnnnnnnnnnnnnnnnnnnnnnnnnnnnnnnnnnnnnnnnnnnnnnnnnnnnnnnnnnnnnnnnnnnnnnnnnnnnnnnnnnnnnnnnnnnnnnnnnnnnnnnnnnnnnnnnnnnnnnnnnnnnnnnnnnnnnnnnnnnnnnnnnnnnnnnnnnnnnnnnnnnnnnnnnnnnnnnnnnnnnnnnnnnnnnnnnnnnnnnnnnnnnnnnnnnnnnnnnnnnnnnnnnnnnnnnnnnnnnnnnnnnnnnnnnnnnnnnnnnnnnnnnnnnnnnnnnnnnnnnnnnnnnnnnnnnnnnnnnnnnnnnnnnnnnnnnnnnnnnnnnnnnnnnnnnnnnnnnnnnnnnnnnnnnnnnnnnnnnnnnnnnnnnnnnnnnnnnnnnnnnnnnnnnnnnnnnnnnnnnnnnnnnnnnnnnnnnnnnnnnnnnnnnnnnnnnnnnnnnnnnnnnnnnnnnnnnnnnnnnnnnnnnnnnnnnnnnnnnnnnnnnnnnnnnnnnnnnnnnnnnnnnnnnnnnnnnnnnnnnnnnnnnnnnnnnnnnnnnnnnnnnnnnnnnnnnnnnnnnnnnnnnnnnnnnnnnnnnnnnnnnnnnnnnnnnnnnnnnnnnnnnnnnnnnnnnnnnnnnnnnnnnnnnnnnnnnnnnnnnnnnnnnnnnnnnnnnnnnnnnnnnnnnnnnnnnnnnnnnnnnnnnnnnnnnnnnnnnnnnnnnnnnnnnnnnnnnnnnnnnnnnnnnnnnnnnnnnnnnnnnnnnnnnnnnnnnnnnnnnnnnnnnnnnnnnnnnnnnnnnnnnnnnnnnnnnnnnnnnnnnnnnnnnnnnnnnnnnnnnnnnnnnnnnnnnnnnnnnnnnnnnnnnnnnnnnnnnnnnnnnnnnnnnnnnnnnnnnnnnnnnnnnnnnnnnnnnnnnnnnnnnnnnnnnnnnnnnnnnnnnnnnnnnnnnnnnnnnnnnnnnnnnnnnnnnnnnnnnnnnnnnnnnnnnnnnnnnnnnnnnnnnnnnnnnnnnnnnnnnnnnnnnnnnnnnnnnnnnnnnnnnnnnnnnnnnnnnnnnnnnnnnnnnnnnnnnnnnnnnnnnnnnnnnnnnnnnnnnnnnnnnnnnnnnnnnnnnnnnnnnnnnnnnnnnnnnnnnnnnnnnnnnnnnnnnnnnnnnnnnnnnnnnnnnnnnnnnnnnnnnnnnnnnnnnnnnnnnnnnnnnnnnnnnnnnnnnnnnnnnnnnnnnnnnnnnnnnnnnnnnnnnnnnnnnnnnnnnnnnnnnnnnnnnnnnnnnnnnnnnnnnnnnnnnnnnnnnnnnnnnnnnnnnnnnnnnnnnnnnnnnnnnnnnnnnnnnnnnnnnnnnnnnnnnnnnnnnnnnnnnnnnnnnnnnnnnnnnnnnnnnnnnnnnnnnnnnnnnnnnnnnnnnnnnnnnnnnnnnnnnnnnnnnnnnnnnnnnnnnnnnnnnnnnnnnnnnnnnnnnnnnnnnnnnnnnnnnnnnnnnnnnnnnnnnnnnnnnnnnnnnnnnnnnnnnnnnnnnnnnnnnnnnnnnnnnnnnnnnnnnnnnnnnnnnnnnnnnnnnnnnnnnnnnnnnnnnnnnnnnnnnnnnnnnnnnnnnnnnnnnnnnnnnnnnnnnnnnnnnnnnnnnnnnnnnnnnnnnnnnnnnnnnnnnnnnnnnnnnnnnnnnnnnnnnnnnnnnnnnnnnnnnnnnnnnnnnnnnnnnnnnnnnnnnnnnnnnnnnnnnnnnnnnnnnnnnnnnnnnnnnnnnnnnnnnnnnnnnnnnnnnnnnnnnnnnnnnnnnnnnnnnnnnnnnnnnnnnnnnnnnnnnnnnnnnnnnnnnnnnnnnnnnnnnnnnnnnnnnnnnnnnnnnnnnnnnnnnnnnnnnnnnnnnnnnnnnnnnnnnnnnnnnnnnnnnnnnnnnnnnnnnnnnnnnnnnnnnnnnnnnnnnnnnnnnnnnnnnnnnnnnnnnnnnnnnnnnnnnnnnnnnnnnnnnnnnnnnnnnnnnnnnnnnnnnnnnnnnnnnnnnnnnnnnnnnnnnnnnnnnnnnnnnnnnnnnnnnnnnnnnnnnnnnnnnnnnnnnnnnnnnnnnnnnnnnnnnnnnnnnnnnnnnnnnnnnnnnnnnnnnnnnnnnnnnnnnnnnnnnnnnnnnnnnnnnnnnnnnnnnnnnnnnnnnnnnnnnnnnnnnnnnnnnnnnnnnnnnnnnnnnnnnnnnnnnnnnnnnnnnnnnnnnnnnnnnnnnnnnnnnnnnnnnnnnnnnnnnnnnnnnnnnnnnnnnnnnnnnnnnnnnnnnnnnnnnnnnnnnnnnnnnnnnnnnnnnnnnnnnnnnnnnnnnnnnnnnnnnnnnnnnnnnnnnnnnnnnnnnnnnnnnnnnnnnnnnnnnnnnnnnnnnnnnnnnnnnnnnnnnnnnnnnnnnnnnnnnnnnnnnnnnnnnnnnnnnnnnnnnnnnnnnnnnnnnnnnnnnnnnnnnnnnnnnnnnnnnnnnnnnnnnnnnnnnnnnnnnnnnnnnnnnnnnnnnnnnnnnnnnnnnnnnnnnnnnnnnnnnnnnnnnnnnnnnnnnnnnnnnnnnnnnnnnnnnnnnnnnnnnnnnnnnnnnnnnnnnnnnnnnnnnnnnnnnnnnnnnnnnnnnnnnnnnnnnnnnnnnnnnnnnnnnnnnnnnnnnnnnnnnnnnnnnnnnnnnnnnnnnnnnnnnnnnnnnnnnnnnnnnnnnnnnnnnnnnnnnnnnnnnnnnnnnnnnnnnnnnnnnnnnnnnnnnnnnnnnnnnnnnnnnnnnnnnnnnnnnnnnnnnnnnnnnnnnnnnnnnnnnnnnnnnnnnnnnnnnnnnnnnnnnnnnnnnnnnnnnnnnnnnnnnnnnnnnnnnnnnnnnnnnnnnnnnnnnnnnnnnnnnnnnnnnnnnnnnnnnnnnnnnnnnnnnnnnnnnnnnnnnnnnnnnnnnnnnnnnnnnnnnnnnnnnnnnnnnnnnnnnnnnnnnnnnnnnnnnnnnnnnnnnnnnnnnnnnnnnnnnnnnnnnnnnnnnnnnnnnnnnnnnnnnnnnnnnnnnnnnnnnnnnnnnnnnnnnnnnnnnnnnnnnnnnnnnnnnnnnnnnnnnnnnnnnnnnnnnnnnnnnnnnnnnnnnnnnnnnnnnnnnnnnnnnnnnnnnnnnnnnnnnnnnnnnnnnnnnnnnnnnnnnnnnnnnnnnnnnnnnnnnnnnnnnnnnnnnnnnnnnnnnnnnnnnnnnnnnnnnnnnnnnnnnnnnnnnnnnnnnnnnnnnnnnnnnnnnnnnnnnnnnnnnnnnnnnnnnnnnnnnnnnnnnnnnnnnnnnnnnnnnnnnnnnnnnnnnnnnnnnnnnnnnnnnnnnnnnnnnnnnnnnnnnnnnnnnnnnnnnnnnnnnnnnnnnnnnnnnnnnnnnnnnnnnnnnnnnnnnnnnnnnnnnnnnnnnnnnnnnnnnnnnnnnnnnnnnnnnnnnnnnnnnnnnnnnnnnnnnnnnnnnnnnnnnnnnnnnnnnnnnnnnnnnnnnnnnnnnnnnnnnnnnnnnnnnnnnnnnnnnnnnnnnnnnnnnnnnnnnnnnnnnnnnnnnnnnnnnnnnnnnnnnnnnnnnnnnnnnnnnnnnnnnnnnnnnnnnnnnnnnnnnnnnnnnnnnnnnnnnnnnnnnnnnnnnnnnnnnnnnnnnnnnnnnnnnnnnnnnnnnnnnnnnnnnnnnnnnnnnnnnnnnnnnnnnnnnnnnnnnnnnnnnnnnnnnnnnnnnnnnnnnnnnnnnnnnnnnnnnnnnnnnnnnnnnnnnnnnnnnnnnnnnnnnnnnnnnnnnnnnnnnnnnnnnnnnnnnnnnnnnnnnnnnnnnnnnnnnnnnnnnnnnnnnnnnnnnnnnnnnnnnnnnnnnnnnnnnnnnnnnnnnnnnnnnnnnnnnnnnnnnnnnnnnnnnnnnnnnnnnnnnnnnnnnnnnnnnnnnnnnnnnnnnnnnnnnnnnnnnnnnnnnnnnnnnnnnnnnnnnnnnnnnnnnnnnnnnnnnnnnnnnnnnnnnnnnnnnnnnnnnnnnnnnnnnnnnnnnnnnnnnnnnnnnnnnnnnnnnnnnnnnnnnnnnnnnnnnnnnnnnnnnnnnnnnnnnnnnnnnnnnnnnnnnnnnnnnnnnnnnnnnnnnnnnnnnnnnnnnnnnnnnnnnnnnnnnnnnnnnnnnnnnnnnnnnnnnnnnnnnnnnnnnnnnnnnnnnnnnnnnnnnnnnnnnnnnnnnnnnnnnnnnnnnnnnnnnnnnnnnnnnnnnnnnnnnnnnnnnnnnnnnnnnnnnnnnnnnnnnnnnnnnnnnnnnnnnnnnnnnnnnnnnnnnnnnnnnnnnnnnnnnnnnnnnnnnnnnnnnnnnnnnnnnnnnnnnnnnnnnnnnnnnnnnnnnnnnnnnnnnnnnnnnnnnnnnnnnnnnnnnnnnnnnnnnnnnnnnnnnnnnnnnnnnnnnnnnnnnnnnnnnnnnnnnnnnnnnnnnnnnnnnnnnnnnnnnnnnnnnnnnnnnnnnnnnnnnnnnnnnnnnnnnnnnnnnnnnnnnnnnnnnnnnnnnnnnnnnnnnnnnnnnnnnnnnnnnnnnnnnnnnnnnnnnnnnnnnnnnnnnnnnnnnnnnnnnnnnnnnnnnnnnnnnnnnnnnnnnnnnnnnnnnnnnnnnnnnnnnnnnnnnnnnnnnnnnnnnnnnnnnnnnnnnnnnnnnnnnnnnnnnnnnnnnnnnnnnnnnnnnnnnnnnnnnnnnnnnnnnnnnnnnnnnnnnnnnnnnnnnnnnnnnnnnnnnnnnnnnnnnnnnnnnnnnnnnnnnnnnnnnnnnnnnnnnnnnnnnnnnnnnnnnnnnnnnnnnnnnnnnnnnnnnnnnnnnnnnnnnnnnnnnnnnnnnnnnnnnnnnnnnnnnnnnnnnnnnnnnnnnnnnnnnnnnnnnnnnnnnnnnnnnnnnnnnnnnnnnnnnnnnnnnnnnnnnnnnnnnnnnnnnnnnnnnnnnnnnnnnnnnnnnnnnnnnnnnnnnnnnnnnnnnnnnnnnnnnnnnnnnnnnnnnnnnnnnnnnnnnnnnnnnnnnnnnnnnnnnnnnnnnnnnnnnnnnnnnnnnnnnnnnnnnnnnnnnnnnnnnnnnnnnnnnnnnnnnnnnnnnnnnnnnnnnnnnnnnnnnnnnnnnnnnnnnnnnnnnnnnnnnnnnnnnnnnnnnnnnnnnnnnnnnnnnnnnnnnnnnnnnnnnnnnnnnnnnnnnnnnnnnnnnnnnnnnnnnnnnnnnnnnnnnnnnnnnnnnnnnnnnnnnnnnnnnnnnnnnnnnnnnnnnnnnnnnnnnnnnnnnnnnnnnnnnnnnnnnnnnnnnnnnnnnnnnnnnnnnnnnnnnnnnnnnnnnnnnnnnnnnnnnnnnnnnnnnnnnnnnnnnnnnnnnnnnnnnnnnnnnnnnnnnnnnnnnnnnnnnnnnnnnnnnnnnnnnnnnnnnnnnnnnnnnnnnnnnnnnnnnnnnnnnnnnnnnnnnnnnnnnnnnnnnnnnnnnnnnnnnnnnnnnnnnnnnnnnnnnnnnnnnnnnnnnnnnnnnnnnnnnnnnnnnnnnnnnnnnnnnnnnnnnnnnnnnnnnnnnnnnnnnnnnnnnnnnnnnnnnnnnnnnnnnnnnnnnnnnnnnnnnnnnnnnnnnnnnnnnnnnnnnnnnnnnnnnnnnnnnnnnnnnnnnnnnnnnnnnnnnnnnnnnnnnnnnnnnnnnnnnnnnnnnnnnnnnnnnnnnnnnnnnnnnnnnnnnnnnnnnnnnnnnnnnnnnnnnnnnnnnnnnnnnnnnnnnnnnnnnnnnnnnnnnnnnnnnnnnnnnnnnnnnnnnnnnnnnnnnnnnnnnnnnnnnnnnnnnnnnnnnnnnnnnnnnnnnnnnnnnnnnnnnnnnnnnnnnnnnnnnnnnnnnnnnnnnnnnnnnnnnnnnnnnnnnnnnnnnnnnnnnnnnnnnnnnnnnnnnnnnnnnnnnnnnnnnnnnnnnnnnnnnnnnnnnnnnnnnnnnnnnnnnnnnnnnnnnnnnnnnnnnnnnnnnnnnnnnnnnnnnnnnnnnnnnnnnnnnnnnnnnnnnnnnnnnnnnnnnnnnnnnnnnnnnnnnnnnnnnnnnnnnnnnnnnnnnnnnnnnnnnnnnnnnnnnnnnnnnnnnnnnnnnnnnnnnnnnnnnnnnnnnnnnnnnnnnnnnnnnnnnnnnnnnnnnnnnnnnnnnnnnnnnnnnnnnnnnnnnnnnnnnnnnnnnnnnnnnnnnnnnnnnnnnnnnnnnnnnnnnnnnnnnnnnnnnnnnnnnnnnnnnnnnnnnnnnnnnnnnnnnnnnnnnnnnnnnnnnnnnnnnnnnnnnnnnnnnnnnnnnnnnnnnnnnnnnnnnnnnnnnnnnnnnnnnnnnnnnnnnnnnnnnnnnnnnnnnnnnnnnnnnnnnnnnnnnnnnnnnnnnnnnnnnnnnnnnnnnnnnnnnnnnnnnnnnnnnnnnnnnnnnnnnnnnnnnnnnnnnnnnnnnnnnnnnnnnnnnnnnnnnnnnnnnnnnnnnnnnnnnnnnnnnnnnnnnnnnnnnnnnnnnnnnnnnnnnnnnnnnnnnnnnnnnnnnnnnnnnnnnnnnnnnnnnnnnnnnnnnnnnnnnnnnnnnnnnnnnnnnnnnnnnnnnnnnnnnnnnnnnnnnnnnnnnnnnnnnnnnnnnnnnnnnnnnnnnnnnnnnnnnnnnnnnnnnnnnnnnnnnnnnnnnnnnnnnnnnnnnnnnnnnnnnnnnnnnnnnnnnnnnnnnnnnnnnnnnnnnnnnnnnnnnnnnnnnnnnnnnnnnnnnnnnnnnnnnnnnnnnnnnnnnnnnnnnnnnnnnnnnnnnnnnnnnnnnnnnnnnnnnnnnnnnnnnnnnnnnnnnnnnnnnnnnnnnnnnnnnnnnnnnnnnnnnnnnnnnnnnnnnnnnnnnnnnnnnnnnnnnnnnnnnnnnnnnnnnnnnnnnnnnnnnnnnnnnnnnnnnnnnnnnnnnnnnnnnnnnnnnnnnnnnnnnnnnnnnnnnnnnnnnnnnnnnnnnnnnnnnnnnnnnnnnnnnnnnnnnnnnnnnnnnnnnnnnnnnnnnnnnnnnnnnnnnnnnnnnnnnnnnnnnnnnnnnnnnnnnnnnnnnnnnnnnnnnnnnnnnnnnnnnnnnnnnnnnnnnnnnnnnnnnnnnnnnnnnnnnnnnnnnnnnnnnnnnnnnnnnnnnnnnnnnnnnnnnnnnnnnnnnnnnnnnnnnnnnnnnnnnnnnnnnnnnnnnnnnnnnnnnnnnnnnnnnnnnnnnnnnnnnnnnnnnnnnnnnnnnnnnnnnnnnnnnnnnnnnnnnnnnnnnnnnnnnnnnnnnnnnnnnnnnnnnnnnnnnnnnnnnnnnnnnnnnnnnnnnnnnnnnnnnnnnnnnnnnnnnnnnnnnnnnnnnnnnnnnnnnnnnnnnnnnnnnnnnnnnnnnnnnnnnnnnnnnnnnnnnnnnnnnnnnnnnnnnnnnnnnnnnnnnnnnnnnnnnnnnnnnnnnnnnnnnnnnnnnnnnnnnnnnnnnnnnnnnnnnnnnnnnnnnnnnnnnnnnnnnnnnnnnnnnnnnnnnnnnnnnnnnnnnnnnnnnnnnnnnnnnnnnnnnnnnnnnnnnnnnnnnnnnnnnnnnnnnnnnnnnnnnnnnnnnnnnnnnnnnnnnnnnnnnnnnnnnnnnnnnnnnnnnnnnnnnnnnnnnnnnnnnnnnnnnnnnnnnnnnnnnnnnnnnnnnnnnnnnnnnnnnnnnnnnnnnnnnnnnnnnnnnnnnnnnnnnnnnnnnnnnnnnnnnnnnnnnnnnnnnnnnnnnnnnnnnnnnnnnnnnnnnnnnnnnnnnnnnnnnnnnnnnnnnnnnnnnnnnnnnnnnnnnnnnnnnnnnnnnnnnnnnnnnnnnnnnnnnnnnnnnnnnnnnnnnnnnnnnnnnnnnnnnnnnnnnnnnnnnnnnnnnnnnnnnnnnnnnnnnnnnnnnnnnnnnnnnnnnnnnnnnnnnnnnnnnnnnnnnnnnnnnnnnnnnnnnnnnnnnnnnnnnnnnnnnnnnnnnnnnnnnnnnnnnnnnnnnnnnnnnnnnnnnnnnnnnnnnnnnnnnnnnnnnnnnnnnnnnnnnnnnnnnnnnnnnnnnnnnnnnnnnnnnnnnnnnnnnnnnnnnnnnnnnnnnnnnnnnnnnnnnnnnnnnnnnnnnnnnnnnnnnnnnnnnnnnnnnnnnnnnnnnnnnnnnnnnnnnnnnnnnnnnnnnnnnnnnnnnnnnnnnnnnnnnnnnnnnnnnnnnnnnnnnnnnnnnnnnnnnnnnnnnnnnnnnnnnnnnnnnnnnnnnnnnnnnnnnnnnnnnnnnnnnnnnnnnnnnnnnnnnnnnnnnnnnnnnnnnnnnnnnnnnnnnnnnnnnnnnnnnnnnnnnnnnnnnnnnnnnnnnnnnnnnnnnnnnnnnnnnnnnnnnnnnnnnnnnnnnnnnnnnnnnnnnnnnnnnnnnnnnnnnnnnnnnnnnnnnnnnnnnnnnnnnnnnnnnnnnnnnnnnnnnnnnnnnnnnnnnnnnnnnnnnnnnnnnnnnnnnnnnnnnnnnnnnnnnnnnnnnnnnnnnnnnnnnnnnnnnnnnnnnnnnnnnnnnnnnnnnnnnnnnnnnnnnnnnnnnnnnnnnnnnnnnnnnnnnnnnnnnnnnnnnnnnnnnnnnnnnnnnnnnnnnnnnnnnnnnnnnnnnnnnnnnnnnnnnnnnnnnnnnnnnnnnnnnnnnnnnnnnnnnnnnnnnnnnnnnnnnnnnnnnnnnnnnnnnnnnnnnnnnnnnnnnnnnnnnnnnnnnnnnnnnnnnnnnnnnnnnnnnnnnnnnnnnnnnnnnnnnnnnnnnnnnnnnnnnnnnnnnnnnnnnnnnnnnnnnnnnnnnnnnnnnnnnnnnnnnnnnnnnnnnnnnnnnnnnnnnnnnnnnnnnnnnnnnnnnnnnnnnnnnnnnnnnnnnnnnnnnnnnnnnnnnnnnnnnnnnnnnnnnnnnnnnnnnnnnnnnnnnnnnnnnnnnnnnnnnnnnnnnnnnnnnnnnnnnnnnnnnnnnnnnnnnnnnnnnnnnnnnnnnnnnnnnnnnnnnnnnnnnnnnnnnnnnnnnnnnnnnnnnnnnnnnnnnnnnnnnnnnnnnnnnnnnnnnnnnnnnnnnnnnnnnnnnnnnnnnnnnnnnnnnnnnnnnnnnnnnnnnnnnnnnnnnnnnnnnnnnnnnnnnnnnnnnnnnnnnnnnnnnnnnnnnnnnnnnnnnnnnnnnnnnnnnnnnnnnnnnnnnnnnnnnnnnnnnnnnnnnnnnnnnnnnnnnnnnnnnnnnnnnnnnnnnnnnnnnnnnnnnnnnnnnnnnnnnnnnnnnnnnnnnnnnnnnnnnnnnnnnnnnnnnnnnnnnnnnnnnnnnnnnnnnnnnnnnnnnnnnnnnnnnnnnnnnnnnnnnnnnnnnnnnnnnnnnnnnnnnnnnnnnnnnnnnnnnnnnnnnnnnnnnnnnnnnnnnnnnnnnnnnnnnnnnnnnnnnnnnnnnnnnnnnnnnnnnnnnnnnnnnnnnnnnnnnnnnnnnnnnnnnnnnnnnnnnnnnnnnnnnnnnnnnnnnnnnnnnnnnnnnnnnnnnnnnnnnnnnnnnnnnnnnnnnnnnnnnnnnnnnnnnnnnnnnnnnnnnnnnnnnnnnnnnnnnnnnnnnnnnnnnnnnnnnnnnnnnnnnnnnnnnnnnnnnnnnnnnnnnnnnnnnnnnnnnnnnnnnnnnnnnnnnnnnnnnnnnnnnnnnnnnnnnnnnnnnnnnnnnnnnnnnnnnnnnnnnnnnnnnnnnnnnnnnnnnnnnnnnnnnnnnnnnnnnnnnnnnnnnnnnnnnnnnnnnnnnnnnnnnnnnnnnnnnnnnnnnnnnnnnnnnnnnnnnnnnnnnnnnnnnnnnnnnnnnnnnnnnnnnnnnnnnnnnnnnnnnnnnnnnnnnnnnnnnnnnnnnnnnnnnnnnnnnnnnnnnnnnnnnnnnnnnnnnnnnnnnnnnnnnnnnnnnnnnnnnnnnnnnnnnnnnnnnnnnnnnnnnnnnnnnnnnnnnnnnnnnnnnnnnnnnnnnnnnnnnnnnnnnnnnnnnnnnnnnnnnnnnnnnnnnnnnnnnnnnnnnnnnnnnnnnnnnnnnnnnnnnnnnnnnnnnnnnnnnnnnnnnnnnnnnnnnnnnnnnnnnnnnnnnnnnnnnnnnnnnnnnnnnnnnnnnnnnnnnnnnnnnnnnnnnnnnnnnnnnnnnnnnnnnnnnnnnnnnnnnnnnnnnnnnnnnnnnnnnnnnnnnnnnnnnnnnnnnnnnnnnnnnnnnnnnnnnnnnnnnnnnnnnnnnnnnnnnnnnnnnnnnnnnnnnnnnnnnnnnnnnnnnnnnnnnnnnnnnnnnnnnnnnnnnnnnnnnnnnnnnnnnnnnnnnnnnnnnnnnnnnnnnnnnnnnnnnnnnnnnnnnnnnnnnnnnnnnnnnnnnnnnnnnnnnnnnnnnnnnnnnnnnnnnnnnnnnnnnnnnnnnnnnnnnnnnnnnnnnnnnnnnnnnnnnnnnnnnnnnnnnnnnnnnnnnnnnnnnnnnnnnnnnnnnnnnnnnnnnnnnnnnnnnnnnnnnnnnnnnnnnnnnnnnnnnnnnnnnnnnnnnnnnnnnnnnnnnnnnnnnnnnnnnnnnnnnnnnnnnnnnnnnnnnnnnnnnnnnnnnnnnnnnnnnnnnnnnnnnnnnnnnnnnnnnnnnnnnnnnnnnnnnnnnnnnnnnnnnnnnnnnnnnnnnnnnnnnnnnnnnnnnnnnnnnnnnnnnnnnnnnnnnnnnnnnnnnnnnnnnnnnnnnnnnnnnnnnnnnnnnnnnnnnnnnnnnnnnnnnnnnnnnnnnnnnnnnnnnnnnnnnnnnnnnnnnnnnnnnnnnnnnnnnnnnnnnnnnnnnnnnnnnnnnnnnnnnnnnnnnnnnnnnnnnnnnnnnnnnnnnnnnnnnnnnnnnnnnnnnnnnnnnnnnnnnnnnnnnnnnnnnnnnnnnnnnnnnnnnnnnnnnnnnnnnnnnnnnnnnnnnnnnnnnnnnnnnnnnnnnnnnnnnnnnnnnnnnnnnnnnnnnnnnnnnnnnnnnnnnnnnnnnnnnnnnnnnnnnnnnnnnnnnnnnnnnnnnnnnnnnnnnnnnnnnnnnnnnnnnnnnnnnnnnnnnnnnnnnnnnnnnnnnnnnnnnnnnnnnnnnnnnnnnnnnnnnnnnnnnnnnnnnnnnnnnnnnnnnnnnnnnnnnnnnnnnnnnnnnnnnnnnnnnnnnnnnnnnnnnnnnnnnnnnnnnnnnnnnnnnnnnnnnnnnnnnnnnnnnnnnnnnnnnnnnnnnnnnnnnnnnnnnnnnnnnnnnnnnnnnnnnnnnnnnnnnnnnnnnnnnnnnnnnnnnnnnnnnnnnnnnnnnnnnnnnnnnnnnnnnnnnnnnnnnnnnnnnnnnnnnnnnnnnnnnnnnnnnnnnnnnnnnnnnnnnnnnnnnnnnnnnnnnnnnnnnnnnnnnnnnnnnnnnnnnnnnnnnnnnnnnnnnnnnnnnnnnnnnnnnnnnnnnnnnnnnnnnnnnnnnnnnnnnnnnnnnnnnnnnnnnnnnnnnnnnnnnnnnnnnnnnnnnnnnnnnnnnnnnnnnnnnnnnnnnnnnnnnnnnnnnnnnnnnnnnnnnnnnnnnnnnnnnnnnnnnnnnnnnnnnnnnnnnnnnnnnnnnnnnnnnnnnnnnnnnnnnnnnnnnnnnnnnnnnnnnnnnnnnnnnnnnnnnnnnnnnnnnnnnnnnnnnnnnnnnnnnnnnnnnnnnnnnnnnnnnnnnnnnnnnnnnnnnnnnnnnnnnnnnnnnnnnnnnnnnnnnnnnnnnnnnnnnnnnnnnnnnnnnnnnnnnnnnnnnnnnnnnnnnnnnnnnnnnnnnnnnnnnnnnnnnnnnnnnnnnnnnnnnnnnnnnnnnnnnnnnnnnnnnnnnnnnnnnnnnnnnnnnnnnnnnnnnnnnnnnnnnnnnnnnnnnnnnnnnnnnnnnnnnnnnnnnnnnnnnnnnnnnnnnnnnnnnnnnnnnnnnnnnnnnnnnnnnnnnnnnnnnnnnnnnnnnnnnnnnnnnnnnnnnnnnnnnnnnnnnnnnnnnnnnnnnnnnnnnnnnnnnnnnnnnnnnnnnnnnnnnnnnnnnnnnnnnnnnnnnnnnnnnnnnnnnnnnnnnnnnnnnnnnnnnnnnnnnnnnnnnnnnnnnnnnnnnnnnnnnnnnnnnnnnnnnnnnnnnnnnnnnnnnnnnnnnnnnnnnnnnnnnnnnnnnnnnnnnnnnnnnnnnnnnnnnnnnnnnnnnnnnnnnnnnnnnnnnnnnnnnnnnnnnnnnnnnnnnnnnnnnnnnnnnnnnnnnnnnnnnnnnnnnnnnnnnnnnnnnnnnnnnnnnnnnnnnnnnnnnnnnnnnnnnnnnnnnnnnnnnnnnnnnnnnnnnnnnnnnnnnnnnnnnnnnnnnnnnnnnnnnnnnnnnnnnnnnnnnnnnnnnnnnnnnnnnnnnnnnnnnnnnnnnnnnnnnnnnnnnnnnnnnnnnnnnnnnnnnnnnnnnnnnnnnnnnnnnnnnnnnnnnnnnnnnnnnnnnnnnnnnnnnnnnnnnnnnnnnnnnnnnnnnnnnnnnnnnnnnnnnnnnnnnnnnnnnnnnnnnnnnnnnnnnnnnnnnnnnnnnnnnnnnnnnnnnnnnnnnnnnnnnnnnnnnnnnnnnnnnnnnnnnnnnnnnnnnnnnnnnnnnnnnnnnnnnnnnnnnnnnnnnnnnnnnnnnnnnnnnnnnnnnnnnnnnnnnnnnnnnnnnnnnnnnnnnnnnnnnnnnnnnnnnnnnnnnnnnnnnnnnnnnnnnnnnnnnnnnnnnnnnnnnnnnnnnnnnnnnnnnnnnnnnnnnnnnnnnnnnnnnnnnnnnnnnnnnnnnnnnnnnnnnnnnnnnnnnnnnnnnnnnnnnnnnnnnnnnnnnnnnnnnnnnnnnnnnnnnnnnnnnnnnnnnnnnnnnnnnnnnnnnnnnnnnnnnnnnnnnnnnnnnnnnnnnnnnnnnnnnnnnnnnnnnnnnnnnnnnnnnnnnnnnnnnnnnnnnnnnnnnnnnnnnnnnnnnnnnnnnnnnnnnnnnnnnnnnnnnnnnnnnnnnnnnnnnnnnnnnnnnnnnnnnnnnnnnnnnnnnnnnnnnnnnnnnnnnnnnnnnnnnnnnnnnnnnnnnnnnnnnnnnnnnnnnnnnnnnnnnnnnnnnnnnnnnnnnnnnnnnnnnnnnnnnnnnnnnnnnnnnnnnnnnnnnnnnnnnnnnnnnnnnnnnnnnnnnnnnnnnnnnnnnnnnnnnnnnnnnnnnnnnnnnnnnnnnnnnnnnnnnnnnnnnnnnnnnnnnnnnnnnnnnnnnnnnnnnnnnnnnnnnnnnnnnnnnnnnnnnnnnnnnnnnnnnnnnnnnnnnnnnnnnnnnnnnnnnnnnnnnnnnnnnnnnnnnnnnnnnnnnnnnnnnnnnnnnnnnnnnnnnnnnnnnnnnnnnnnnnnnnnnnnnnnnnnnnnnnnnnnnnnnnnnnnnnnnnnnnnnnnnnnnnnnnnnnnnnnnnnnnnnnnnnnnnnnnnnnnnnnnnnnnnnnnnnnnnnnnnnnnnnnnnnnnnnnnnnnnnnnnnnnnnnnnnnnnnnnnnnnnnnnnnnnnnnnnnnnnnnnnnnnnnnnnnnnnnnnnnnnnnnnnnnnnnnnnnnnnnnnnnnnnnnnnnnnnnnnnnnnnnnnnnnnnnnnnnnnnnnnnnnnnnnnnnnnnnnnnnnnnnnnnnnnnnnnnnnnnnnnnnnnnnnnnnnnnnnnnnnnnnnnnnnnnnnnnnnnnnnnnnnnnnnnnnnnnnnnnnnnnnnnnnnnnnnnnnnnnnnnnnnnnnnnnnnnnnnnnnnnnnnnnnnnnnnnnnnnnnnnnnnnnnnnnnnnnnnnnnnnnnnnnnnnnnnnnnnnnnnnnnnnnnnnnnnnnnnnnnnnnnnnnnnnnnnnnnnnnnnnnnnnnnnnnnnnnnnnnnnnnnnnnnnnnnnnnnnnnnnnnnnnnnnnnnnnnnnnnnnnnnnnnnnnnnnnnnnnnnnnnnnnnnnnnnnnnnnnnnnnnnnnnnnnnnnnnnnnnnnnnnnnnnnnnnnnnnnnnnnnnnnnnnnnnnnnnnnnnnnnnnnnnnnnnnnnnnnnnnnnnnnnnnnnnnnnnnnnnnnnnnnnnnnnnnnnnnnnnnnnnnnnnnnnnnnnnnnnnnnnnnnnnnnnnnnnnnnnnnnnnnnnnnnnnnnnnnnnnnnnnnnnnnnnnnnnnnnnnnnnnnnnnnnnnnnnnnnnnnnnnnnnnnnnnnnnnnnnnnnnnnnnnnnnnnnnnnnnnnnnnnnnnnnnnnnnnnnnnnnnnnnnnnnnnnnnnnnnnnnnnnnnnnnnnnnnnnnnnnnnnnnnnnnnnnnnnnnnnnnnnnnnnnnnnnnnnnnnnnnnnnnnnnnnnnnnnnnnnnnnnnnnnnnnnnnnnnnnnnnnnnnnnnnnnnnnnnnnnnnnnnnnnnnnnnnnnnnnnnnnnnnnnnnnnnnnnnnnnnnnnnnnnnnnnnnnnnnnnnnnnnnnnnnnnnnnnnnnnnnnnnnnnnnnnnnnnnnnnnnnnnnnnnnnnnnnnnnnnnnnnnnnnnnnnnnnnnnnnnnnnnnnnnnnnnnnnnnnnnnnnnnnnnnnnnnnnnnnnnnnnnnnnnnnnnnnnnnnnnnnnnnnnnnnnnnnnnnnnnnnnnnnnnnnnnnnnnnnnnnnnnnnnnnnnnnnnnnnnnnnnnnnnnnnnnnnnnnnnnnnnnnnnnnnnnnnnnnnnnnnnnnnnnnnnnnnnnnnnnnnnnnnnnnnnnnnnnnnnnnnnnnnnnnnnnnnnnnnnnnnnnnnnnnnnnnnnnnnnnnnnnnnnnnnnnnnnnnnnnnnnnnnnnnnnnnnnnnnnnnnnnnnnnnnnnnnnnnnnnnnnnnnnnnnnnnnnnnnnnnnnnnnnnnnnnnnnnnnnnnnnnnnnnnnnnnnnnnnnnnnnnnnnnnnnnnnnnnnnnnnnnnnnnnnnnnnnnnnnnnnnnnnnnnnnnnnnnnnnnnnnnnnnnnnnnnnnnnnnnnnnnnnnnnnnnnnnnnnnnnnnnnnnnnnnnnnnnnnnnnnnnnnnnnnnnnnnnnnnnnnnnnnnnnnnnnnnnnnnnnnnnnnnnnnnnnnnnnnnnnnnnnnnnnnnnnnnnnnnnnnnnnnnnnnnnnnnnnnnnnnnnnnnnnnnnnnnnnnnnnnnnnnnnnnnnnnnnnnnnnnnnnnnnnnnnnnnnnnnnnnnnnnnnnnnnnnnnnnnnnnnnnnnnnnnnnnnnnnnnnnnnnnnnnnnnnnnnnnnnnnnnnnnnnnnnnnnnnnnnnnnnnnnnnnnnnnnnnnnnnnnnnnnnnnnnnnnnnnnnnnnnnnnnnnnnnnnnnnnnnnnnnnnnnnnnnnnnnnnnnnnnnnnnnnnnnnnnnnnnnnnnnnnnnnnnnnnnnnnnnnnnnnnnnnnnnnnnnnnnnnnnnnnnnnnnnnnnnnnnnnnnnnnnnnnnnnnnnnnnnnnnnnnnnnnnnnnnnnnnnnnnnnnnnnnnnnnnnnnnnnnnnnnnnnnnnnnnnnnnnnnnnnnnnnnnnnnnnnnnnnnnnnnnnnnnnnnnnnnnnnnnnnnnnnnnnnnnnnnnnnnnnnnnnnnnnnnnnnnnnnnnnnnnnnnnnnnnnnnnnnnnnnnnnnnnnnnnnnnnnnnnnnnnnnnnnnnnnnnnnnnnnnnnnnnnnnnnnnnnnnnnnnnnnnnnnnnnnnnnnnnnnnnnnnnnnnnnnnnnnnnnnnnnnnnnnnnnnnnnnnnnnnnnnnnnnnnnnnnnnnnnnnnnnnnnnnnnnnnnnnnnnnnnnnnnnnnnnnnnnnnnnnnnnnnnnnnnnnnnnnnnnnnnnnnnnnnnnnnnnnnnnnnnnnnnnnnnnnnnnnnnnnnnnnnnnnnnnnnnnnnnnnnnnnnnnnnnnnnnnnnnnnnnnnnnnnnnnnnnnnnnnnnnnnnnnnnnnnnnnnnnnnnnnnnnnnnnnnnnnnnnnnnnnnnnnnnnnnnnnnnnnnnnnnnnnnnnnnnnnnnnnnnnnnnnnnnnnnnnnnnnnnnnnnnnnnnnnnnnnnnnnnnnnnnnnnnnnnnnnnnnnnnnnnnnnnnnnnnnnnnnnnnnnnnnnnnnnnnnnnnnnnnnnnnnnnnnnnnnnnnnnnnnnnnnnnnnnnnnnnnnnnnnnnnnnnnnnnnnnnnnnnnnnnnnnnnnnnnnnnnnnnnnnnnnnnnnnnnnnnnnnnnnnnnnnnnnnnnnnnnnnnnnnnnnnnnnnnnnnnnnnnnnnnnnnnnnnnnnnnnnnnnnnnnnnnnnnnnnnnnnnnnnnnnnnnnnnnnnnnnnnnnnnnnnnnnnnnnnnnnnnnnnnnnnnnnnnnnnnnnnnnnnnnnnnnnnnnnnnnnnnnnnnnnnnnnnnnnnnnnnnnnnnnnnnnnnnnnnnnnnnnnnnnnnnnnnnnnnnnnnnnnnnnnnnnnnnnnnnnnnnnnnnnnnnnnnnnnnnnnnnnnnnnnnnnnnnnnnnnnnnnnnnnnnnnnnnnnnnnnnnnnnnnnnnnnnnnnnnnnnnnnnnnnnnnnnnnnnnnnnnnnnnnnnnnnnnnnnnnnnnnnnnnnnnnnnnnnnnnnnnnnnnnnnnnnnnnnnnnnnnnnnnnnnnnnnnnnnnnnnnnnnnnnnnnnnnnnnnnnnnnnnnnnnnnnnnnnnnnnnnnnnnnnnnnnnnnnnnnnnnnnnnnnnnnnnnnnnnnnnnnnnnnnnnnnnnnnnnnnnnnnnnnnnnnnnnnnnnnnnnnnnnnnnnnnnnnnnnnnnnnnnnnnnnnnnnnnnnnnnnnnnnnnnnnnnnnnnnnnnnnnnnnnnnnnnnnnnnnnnnnnnnnnnnnnnnnnnnnnnnnnnnnnnnnnnnnnnnnnnnnnnnnnnnnnnnnnnnnnnnnnnnnnnnnnnnnnnnnnnnnnnnnnnnnnnnnnnnnnnnnnnnnnnnnnnnnnnnnnnnnnnnnnnnnnnnnnnnnnnnnnnnnnnnnnnnnnnnnnnnnnnnnnnnnnnnnnnnnnnnnnnnnnnnnnnnnnnnnnnnnnnnnnnnnnnnnnnnnnnnnnnnnnnnnnnnnnnnnnnnnnnnnnnnnnnnnnnnnnnnnnnnnnnnnnnnnnnnnnnnnnnnnnnnnnnnnnnnnnnnnnnnnnnnnnnnnnnnnnnnnnnnnnnnnnnnnnnnnnnnnnnnnnnnnnnnnnnnnnnnnnnnnnnnnnnnnnnnnnnnnnnnnnnnnnnnnnnnnnnnnnnnnnnnnnnnnnnnnnnnnnnnnnnnnnnnnnnnnnnnnnnnnnnnnnnnnnnnnnnnnnnnnnnnnnnnnnnnnnnnnnnnnnnnnnnnnnnnnnnnnnnnnnnnnnnnnnnnnnnnnnnnnnnnnnnnnnnnnnnnnnnnnnnnnnnnnnnnnnnnnnnnnnnnnnnnnnnnnnnnnnnnnnnnnnnnnnnnnnnnnnnnnnnnnnnnnnnnnnnnnnnnnnnnnnnnnnnnnnnnnnnnnnnnnnnnnnnnnnnnnnnnnnnnnnnnnnnnnnnnnnnnnnnnnnnnnnnnnnnnnnnnnnnnnnnnnnnnnnnnnnnnnnnnnnnnnnnnnnnnnnnnnnnnnnnnnnnnnnnnnnnnnnnnnnnnnnnnnnnnnnnnnnnnnnnnnnnnnnnnnnnnnnnnnnnnnnnnnnnnnnnnnnnnnnnnnnnnnnnnnnnnnnnnnnnnnnnnnnnnnnnnnnnnnnnnnnnnnnnnnnnnnnnnnnnnnnnnnnnnnnnnnnnnnnnnnnnnnnnnnnnnnnnnnnnnnnnnnnnnnnnnnnnnnnnnnnnnnnnnnnnnnnnnnnnnnnnnnnnnnnnnnnnnnnnnnnnnnnnnnnnnnnnnnnnnnnnnnnnnnnnnnnnnnnnnnnnnnnnnnnnnnnnnnnnnnnnnnnnnnnnnnnnnnnnnnnnnnnnnnnnnnnnnnnnnnnnnnnnnnnnnnnnnnnnnnnnnnnnnnnnnnnnnnnnnnnnnnnnnnnnnnnnnnnnnnnnnnnnnnnnnnnnnnnnnnnnnnnnnnnnnnnnnnnnnnnnnnnnnnnnnnnnnnnnnnnnnnnnnnnnnnnnnnnnnnnnnnnnnnnnnnnnnnnnnnnnnnnnnnnnnnnnnnnnnnnnnnnnnnnnnnnnnnnnnnnnnnnnnnnnnnnnnnnnnnnnnnnnnnnnnnnnnnnnnnnnnnnnnnnnnnnnnnnnnnnnnnnnnnnnnnnnnnnnnnnnnnnnnnnnnnnnnnnnnnnnnnnnnnnnnnnnnnnnnnnnnnnnnnnnnnnnnnnnnnnnnnnnnnnnnnnnnnnnnnnnnnnnnnnnnnnnnnnnnnnnnnnnnnnnnnnnnnnnnnnnnnnnnnnnnnnnnnnnnnnnnnnnnnnnnnnnnnnnnnnnnnnnnnnnnnnnnnnnnnnnnnnnnnnnnnnnnnnnnnnnnnnnnnnnnnnnnnnnnnnnnnnnnnnnnnnnnnnnnnnnnnnnnnnnnnnnnnnnnnnnnnnnnnnnnnnnnnnnnnnnnnnnnnnnnnnnnnnnnnnnnnnnnnnnnnnnnnnnnnnnnnnnnnnnnnnnnnnnnnnnnnnnnnnnnnnnnnnnnnnnnnnnnnnnnnnnnnnnnnnnnnnnnnnnnnnnnnnnnnnnnnnnnnnnnnnnnnnnnnnnnnnnnnnnnnnnnnnnnnnnnnnnnnnnnnnnnnnnnnnnnnnnnnnnnnnnnnnnnnnnnnnnnnnnnnnnnnnnnnnnnnnnnnnnnnnnnnnnnnnnnnnnnnnnnnnnnnnnnnnnnnnnnnnnnnnnnnnnnnnnnnnnnnnnnnnnnnnnnnnnnnnnnnnnnnnnnnnnnnnnnnnnnnnnnnnnnnnnnnnnnnnnnnnnnnnnnnnnnnnnnnnnnnnnnnnnnnnnnnnnnnnnnnnnnnnnnnnnnnnnnnnnnnnnnnnnnnnnnnnnnnnnnnnnnnnnnnnnnnnnnnnnnnnnnnnnnnnnnnnnnnnnnnnnnnnnnnnnnnnnnnnnnnnnnnnnnnnnnnnnnnnnnnnnnnnnnnnnnnnnnnnnnnnnnnnnnnnnnnnnnnnnnnnnnnnnnnnnnnnnnnnnnnnnnnnnnnnnnnnnnnnnnnnnnnnnnnnnnnnnnnnnnnnnnnnnnnnnnnnnnnnnnnnnnnnnnnnnnnnnnnnnnnnnnnnnnnnnnnnnnnnnnnnnnnnnnnnnnnnnnnnnnnnnnnnnnnnnnnnnnnnnnnnnnnnnnnnnnnnnnnnnnnnnnnnnnnnnnnnnnnnnnnnnnnnnnnnnnnnnnnnnnnnnnnnnnnnnnnnnnnnnnnnnnnnnnnnnnnnnnnnnnnnnnnnnnnnnnnnnnnnnnnnnnnnnnnnnnnnnnnnnnnnnnnnnnnnnnnnnnnnnnnnnnnnnnnnnnnnnnnnnnnnnnnnnnnnnnnnnnnnnnnnnnnnnnnnnnnnnnnnnnnnnnnnnnnnnnnnnnnnnnnnnnnnnnnnnnnnnnnnnnnnnnnnnnnnnnnnnnnnnnnnnnnnnnnnnnnnnnnnnnnnnnnnnnnnnnnnnnnnnnnnnnnnnnnnnnnnnnnnnnnnnnnnnnnnnnnnnnnnnnnnnnnnnnnnnnnnnnnnnnnnnnnnnnnnnnnnnnnnnnnnnnnnnnnnnnnnnnnnnnnnnnnnnnnnnnnnnnnnnnnnnnnnnnnnnnnnnnnnnnnnnnnnnnnnnnnnnnnnnnnnnnnnnnnnnnnnnnnnnnnnnnnnnnnnnnnnnnnnnnnnnnnnnnnnnnnnnnnnnnnnnnnnnnnnnnnnnnnnnnnnnnnnnnnnnnnnnnnnnnnnnnnnnnnnnnnnnnnnnnnnnnnnnnnnnnnnnnnnnnnnnnnnnnnnnnnnnnnnnnnnnnnnnnnnnnnnnnnnnnnnnnnnnnnnnnnnnnnnnnnnnnnnnnnnnnnnnnnnnnnnnnnnnnnnnnnnnnnnnnnnnnnnnnnnnnnnnnnnnnnnnnnnnnnnnnnnnnnnnnnnnnnnnnnnnnnnnnnnnnnnnnnnnnnnnnnnnnnnnnnnnnnnnnnnnnnnnnnnnnnnnnnnnnnnnnnnnnnnnnnnnnnnnnnnnnnnnnnnnnnnnnnnnnnnnnnnnnnnnnnnnnnnnnnnnnnnnnnnnnnnnnnnnnnnnnnnnnnnnnnnnnnnnnnnnnnnnnnnnnnnnnnnnnnnnnnnnnnnnnnnnnnnnnnnnnnnnnnnnnnnnnnnnnnnnnnnnnnnnnnnnnnnnnnnnnnnnnnnnnnnnnnnnnnnnnnnnnnnnnnnnnnnnnnnnnnnnnnnnnnnnnnnnnnnnnnnnnnnnnnnnnnnnnnnnnnnnnnnnnnnnnnnnnnnnnnnnnnnnnnnnnnnnnnnnnnnnnnnnnnnnnnnnnnnnnnnnnnnnnnnnnnnnnnnnnnnnnnnnnnnnnnnnnnnnnnnnnnnnnnnnnnnnnnnnnnnnnnnnnnnnnnnnnnnnnnnnnnnnnnnnnnnnnnnnnnnnnnnnnnnnnnnnnnnnnnnnnnnnnnnnnnnnnnnnnnnnnnnnnnnnnnnnnnnnnnnnnnnnnnnnnnnnnnnnnnnnnnnnnnnnnnnnnnnnnnnnnnnnnnnnnnnnnnnnnnnnnnnnnnnnnnnnnnnnnnnnnnnnnnnnnnnnnnnnnnnnnnnnnnnnnnnnnnnnnnnnnnnnnnnnnnnnnnnnnnnnnnnnnnnnnnnnnnnnnnnnnnnnnnnnnnnnnnnnnnnnnnnnnnnnnnnnnnnnnnnnnnnnnnnnnnnnnnnnnnnnnnnnnnnnnnnnnnnnnnnnnnnnnnnnnnnnnnnnnnnnnnnnnnnnnnnnnnnnnnnnnnnnnnnnnnnnnnnnnnnnnnnnnnnnnnnnnnnnnnnnnnnnnnnnnnnnnnnnnnnnnnnnnnnnnnnnnnnnnnnnnnnnnnnnnnnnnnnnnnnnnnnnnnnnnnnnnnnnnnnnnnnnnnnnnnnnnnnnnnnnnnnnnnnnnnnnnnnnnnnnnnnnnnnnnnnnnnnnnnnnnnnnnnnnnnnnnnnnnnnnnnnnnnnnnnnnnnnnnnnnnnnnnnnnnnnnnnnnnnnnnnnnnnnnnnnnnnnnnnnnnnnnnnnnnnnnnnnnnnnnnnnnnnnnnnnnnnnnnnnnnnnnnnnnnnnnnnnnnnnnnnnnnnnnnnnnnnnnnnnnnnnnnnnnnnnnnnnnnnnnnnnnnnnnnnnnnnnnnnnnnnnnnnnnnnnnnnnnnnnnnnnnnnnnnnnnnnnnnnnnnnnnnnnnnnnnnnnnnnnnnnnnnnnnnnnnnnnnnnnnnnnnnnnnnnnnnnnnnnnnnnnnnnnnnnnnnnnnnnnnnnnnnnnnnnnnnnnnnnnnnnnnnnnnnnnnnnnnnnnnnnnnnnnnnnnnnnnnnnnnnnnnnnnnnnnnnnnnnnnnnnnnnnnnnnnnnnnnnnnnnnnnnnnnnnnnnnnnnnnnnnnnnnnnnnnnnnnnnnnnnnnnnnnnnnnnnnnnnnnnnnnnnnnnnnnnnnnnnnnnnnnnnnnnnnnnnnnnnnnnnnnnnnnnnnnnnnnnnnnnnnnnnnnnnnnnnnnnnnnnnnnnnnnnnnnnnnnnnnnnnnnnnnnnnnnnnnnnnnnnnnnnnnnnnnnnnnnnnnnnnnnnnnnnnnnnnnnnnnnnnnnnnnnnnnnnnnnnnnnnnnnnnnnnnnnnnnnnnnnnnnnnnnnnnnnnnnnnnnnnnnnnnnnnnnnnnnnnnnnnnnnnnnnnnnnnnnnnnnnnnnnnnnnnnnnnnnnnnnnnnnnnnnnnnnnnnnnnnnnnnnnnnnnnnnnnnnnnnnnnnnnnnnnnnnnnnnnnnnnnnnnnnnnnnnnnnnnnnnnnnnnnnnnnnnnnnnnnnnnnnnnnnnnnnnnnnnnnnnnnnnnnnnnnnnnnnnnnnnnnnnnnnnnnnnnnnnnnnnnnnnnnnnnnnnnnnnnnnnnnnnnnnnnnnnnnnnnnnnnnnnnnnnnnnnnnnnnnnnnnnnnnnnnnnnnnnnnnnnnnnnnnnnnnnnnnnnnnnnnnnnnnnnnnnnnnnnnnnnnnnnnnnnnnnnnnnnnnnnnnnnnnnnnnnnnnnnnnnnnnnnnnnnnnnnnnnnnnnnnnnnnnnnnnnnnnnnnnnnnnnnnnnnnnnnnnnnnnnnnnnnnnnnnnnnnnnnnnnnnnnnnnnnnnnnnnnnnnnnnnnnnnnnnnnnnnnnnnnnnnnnnnnnnnnnnnnnnnnnnnnnnnnnnnnnnnnnnnnnnnnnnnnnnnnnnnnnnnnnnnnnnnnnnnnnnnnnnnnnnnnnnnnnnnnnnnnnnnnnnnnnnnnnnnnnnnnnnnnnnnnnnnnnnnnnnnnnnnnnnnnnnnnnnnnnnnnnnnnnnnnnnnnnnnnnnnnnnnnnnnnnnnnnnnnnnnnnnnnnnnnnnnnnnnnnnnnnnnnnnnnnnnnnnnnnnnnnnnnnnnnnnnnnnnnnnnnnnnnnnnnnnnnnnnnnnnnnnnnnnnnnnnnnnnnnnnnnnnnnnnnnnnnnnnnnnnnnnnnnnnnnnnnnnnnnnnnnnnnnnnnnnnnnnnnnnnnnnnnnnnnnnnnnnnnnnnnnnnnnnnnnnnnnnnnnnnnnnnnnnnnnnnnnnnnnnnnnnnnnnnnnnnnnnnnnnnnnnnnnnnnnnnnnnnnnnnnnnnnnnnnnnnnnnnnnnnnnnnnnnnnnnnnnnnnnnnnnnnnnnnnnnnnnnnnnnnnnnnnnnnnnnnnnnnnnnnnnnnnnnnnnnnnnnnnnnnnnnnnnnnnnnnnnnnnnnnnnnnnnnnnnnnnnnnnnnnnnnnnnnnnnnnnnnnnnnnnnnnnnnnnnnnnnnnnnnnnnnnnnnnnnnnnnnnnnnnnnnnnnnnnnnnnnnnnnnnnnnnnnnnnnnnnnnnnnnnnnnnnnnnnnnnnnnnnnnnnnnnnnnnnnnnnnnnnnnnnnnnnnnnnnnnnnnnnnnnnnnnnnnnnnnnnnnnnnnnnnnnnnnnnnnnnnnnnnnnnnnnnnnnnnnnnnnnnnnnnnnnnnnnnnnnnnnnnnnnnnnnnnnnnnnnnnnnnnnnnnnnnnnnnnnnnnnnnnnnnnnnnnnnnnnnnnnnnnnnnnnnnnnnnnnnnnnnnnnnnnnnnnnnnnnnnnnnnnnnnnnnnnnnnnnnnnnnnnnnnnnnnnnnnnnnnnnnnnnnnnnnnnnnnnnnnnnnnnnnnnnnnnnnnnnnnnnnnnnnnnnnnnnnnnnnnnnnnnnnnnnnnnnnnnnnnnnnnnnnnnnnnnnnnnnnnnnnnnnnnnnnnnnnnnnnnnnnnnnnnnnnnnnnnnnnnnnnnnnnnnnnnnnnnnnnnnnnnnnnnnnnnnnnnnnnnnnnnnnnnnnnnnnnnnnnnnnnnnnnnnnnnnnnnnnnnnnnnnnnnnnnnnnnnnnnnnnnnnnnnnnnnnnnnnnnnnnnnnnnnnnnnnnnnnnnnnnnnnnnnnnnnnnnnnnnnnnnnnnnnnnnnnnnnnnnnnnnnnnnnnnnnnnnnnnnnnnnnnnnnnnnnnnnnnnnnnnnnnnnnnnnnnnnnnnnnnnnnnnnnnnnnnnnnnnnnnnnnnnnnnnnnnnnnnnnnnnnnnnnnnnnnnnnnnnnnnnnnnnnnnnnnnnnnnnnnnnnnnnnnnnnnnnnnnnnnnnnnnnnnnnnnnnnnnnnnnnnnnnnnnnnnnnnnnnnnnnnnnnnnnnnnnnnnnnnnnnnnnnnnnnnnnnnnnnnnnnnnnnnnnnnnnnnnnnnnnnnnnnnnnnnnnnnnnnnnnnnnnnnnnnnnnnnnnnnnnnnnnnnnnnnnnnnnnnnnnnnnnnnnnnnnnnnnnnnnnnnnnnnnnnnnnnnnnnnnnnnnnnnnnnnnnnnnnnnnnnnnnnnnnnnnnnnnnnnnnnnnnnnnnnnnnnnnnnnnnnnnnnnnnnnnnnnnnnnnnnnnnnnnnnnnnnnnnnnnnnnnnnnnnnnnnnnnnnnnnnnnnnnnnnnnnnnnnnnnnnnnnnnnnnnnnnnnnnnnnnnnnnnnnnnnnnnnnnnnnnnnnnnnnnnnnnnnnnnnnnnnnnnnnnnnnnnnnnnnnnnnnnnnnnnnnnnnnnnnnnnnnnnnnnnnnnnnnnnnnnnnnnnnnnnnnnnnnnnnnnnnnnnnnnnnnnnnnnnnnnnnnnnnnnnnnnnnnnnnnnnnnnnnnnnnnnnnnnnnnnnnnnnnnnnnnnnnnnnnnnnnnnnnnnnnnnnnnnnnnnnnnnnnnnnnnnnnnnnnnnnnnnnnnnnnnnnnnnnnnnnnnnnnnnnnnnnnnnnnnnnnnnnnnnnnnnnnnnnnnnnnnnnnnnnnnnnnnnnnnnnnnnnnnnnnnnnnnnnnnnnnnnnnnnnnnnnnnnnnnnnnnnnnnnnnnnnnnnnnnnnnnnnnnnnnnnnnnnnnnnnnnnnnnnnnnnnnnnnnnnnnnnnnnnnnnnnnnnnnnnnnnnnnnnnnnnnnnnnnnnnnnnnnnnnnnnnnnnnnnnnnnnnnnnnnnnnnnnnnnnnnnnnnnnnnnnnnnnnnnnnnnnnnnnnnnnnnnnnnnnnnnnnnnnnnnnnnnnnnnnnnnnnnnnnnnnnnnnnnnnnnnnnnnnnnnnnnnnnnnnnnnnnnnnnnnnnnnnnnnnnnnnnnnnnnnnnnnnnnnnnnnnnnnnnnnnnnnnnnnnnnnnnnnnnnnnnnnnnnnnnnnnnnnnnnnnnnnnnnnnnnnnnnnnnnnnnnnnnnnnnnnnnnnnnnnnnnnnnnnnnnnnnnnnnnnnnnnnnnnnnnnnnnnnnnnnnnnnnnnnnnnnnnnnnnnnnnnnnnnnnnnnnnnnnnnnnnnnnnnnnnnnnnnnnnnnnnnnnnnnnnnnnnnnnnnnnnnnnnnnnnnnnnnnnnnnnnnnnnnnnnnnnnnnnnnnnnnnnnnnnnnnnnnnnnnnnnnnnnnnnnnnnnnnnnnnnnnnnnnnnnnnnnnnnnnnnnnnnnnnnnnnnnnnnnnnnnnnnnnnnnnnnnnnnnnnnnnnnnnnnnnnnnnnnnnnnnnnnnnnnnnnnnnnnnnnnnnnnnnnnnnnnnnnnnnnnnnnnnnnnnnnnnnnnnnnnnnnnnnnnnnnnnnnnnnnnnnnnnnnnnnnnnnnnnnnnnnnnnnnnnnnnnnnnnnnnnnnnnnnnnnnnnnnnnnnnnnnnnnnnnnnnnnnnnnnnnnnnnnnnnnnnnnnnnnnnnnnnnnnnnnnnnnnnnnnnnnnnnnnnnnnnnnnnnnnnnnnnnnnnnnnnnnnnnnnnnnnnnnnnnnnnnnnnnnnnnnnnnnnnnnnnnnnnnnnnnnnnnnnnnnnnnnnnnnnnnnnnnnnnnnnnnnnnnnnnnnnnnnnnnnnnnnnnnnnnnnnnnnnnnnnnnnnnnnnnnnnnnnnnnnnnnnnnnnnnnnnnnnnnnnnnnnnnnnnnnnnnnnnnnnnnnnnnnnnnnnnnnnnnnnnnnnnnnnnnnnnnnnnnnnnnnnnnnnnnnnnnnnnnnnnnnnnnnnnnnnnnnnnnnnnnnnnnnnnnnnnnnnnnnnnnnnnnnnnnnnnnnnnnnnnnnnnnnnnnnnnnnnnnnnnnnnnnnnnnnnnnnnnnnnnnnnnnnnnnnnnnnnnnnnnnnnnnnnnnnnnnnnnnnnnnnnnnnnnnnnnnnnnnnnnnnnnnnnnnnnnnnnnnnnnnnnnnnnnnnnnnnnnnnnnnnnnnnnnnnnnnnnnnnnnnnnnnnnnnnnnnnnnnnnnnnnnnnnnnnnnnnnnnnnnnnnnnnnnnnnnnnnnnnnnnnnnnnnnnnnnnnnnnnnnnnnnnnnnnnnnnnnnnnnnnnnnnnnnnnnnnnnnnnnnnnnnnnnnnnnnnnnnnnnnnnnnnnnnnnnnnnnnnnnnnnnnnnnnnnnnnnnnnnnnnnnnnnnnnnnnnnnnnnnnnnnnnnnnnnnnnnnnnnnnnnnnnnnnnnnnnnnnnnnnnnnnnnnnnnnnnnnnnnnnnnnnnnnnnnnnnnnnnnnnnnnnnnnnnnnnnnnnnnnnnnnnnnnnnnnnnnnnnnnnnnnnnnnnnnnnnnnnnnnnnnnnnnnnnnnnnnnnnnnnnnnnnnnnnnnnnnnnnnnnnnnnnnnnnnnnnnnnnnnnnnnnnnnnnnnnnnnnnnnnnnnnnnnnnnnnnnnnnnnnnnnnnnnnnnnnnnnnnnnnnnnnnnnnnnnnnnnnnnnnnnnnnnnnnnnnnnnnnnnnnnnnnnnnnnnnnnnnnnnnnnnnnnnnnnnnnnnnnnnnnnnnnnnnnnnnnnnnnnnnnnnnnnnnnnnnnnnnnnnnnnnnnnnnnnnnnnnnnnnnnnnnnnnnnnnnnnnnnnnnnnnnnnnnnnnnnnnnnnnnnnnnnnnnnnnnnnnnnnnnnnnnnnnnnnnnnnnnnnnnnnnnnnnnnnnnnnnnnnnnnnnnnnnnnnnnnnnnnnnnnnnnnnnnnnnnnnnnnnnnnnnnnnnnnnnnnnnnnnnnnnnnnnnnnnnnnnnnnnnnnnnnnnnnnnnnnnnnnnnnnnnnnnnnnnnnnnnnnnnnnnnnnnnnnnnnnnnnnnnnnnnnnnnnnnnnnnnnnnnnnnnnnnnnnnnnnnnnnnnnnnnnnnnnnnnnnnnnnnnnnnnnnnnnnnnnnnnnnnnnnnnnnnnnnnnnnnnnnnnnnnnnnnnnnnnnnnnnnnnnnnnnnnnnnnnnnnnnnnnnnnnnnnnnnnnnnnnnnnnnnnnnnnnnnnnnnnnnnnnnnnnnnnnnnnnnnnnnnnnnnnnnnnnnnnnnnnnnnnnnnnnnnnnnnnnnnnnnnnnnnnnnnnnnnnnnnnnnnnnnnnnnnnnnnnnnnnnnnnnnnnnnnnnnnnnnnnnnnnnnnnnnnnnnnnnnnnnnnnnnnnnnnnnnnnnnnnnnnnnnnnnnnnnnnnnnnnnnnnnnnnnnnnnnnnnnnnnnnnnnnnnnnnnnnnnnnnnnnnnnnnnnnnnnnnnnnnnnnnnnnnnnnnnnnnnnnnnnnnnnnnnnnnnnnnnnnnnnnnnnnnnnnnnnnnnnnnnnnnnnnnnnnnnnnnnnnnnnnnnnnnnnnnnnnnnnnnnnnnnnnnnnnnnnnnnnnnnnnnnnnnnnnnnnnnnnnnnnnnnnnnnnnnnnnnnnnnnnnnnnnnnnnnnnnnnnnnnnnnnnnnnnnnnnnnnnnnnnnnnnnnnnnnnnnnnnnnnnnnnnnnnnnnnnnnnnnnnnnnnnnnnnnnnnnnnnnnnnnnnnnnnnnnnnnnnnnnnnnnnnnnnnnnnnnnnnnnnnnnnnnnnnnnnnnnnnnnnnnnnnnnnnnnnnnnnnnnnnnnnnnnnnnnnnnnnnnnnnnnnnnnnnnnnnnnnnnnnnnnnnnnnnnnnnnnnnnnnnnnnnnnnnnnnnnnnnnnnnnnnnnnnnnnnnnnnnnnnnnnnnnnnnnnnnnnnnnnnnnnnnnnnnnnnnnnnnnnnnnnnnnnnnnnnnnnnnnnnnnnnnnnnnnnnnnnnnnnnnnnnnnnnnnnnnnnnnnnnnnnnnnnnnnnnnnnnnnnnnnnnnnnnnnnnnnnnnnnnnnnnnnnnnnnnnnnnnnnnnnnnnnnnnnnnnnnnnnnnnnnnnnnnnnnnnnnnnnnnnnnnnnnnnnnnnnnnnnnnnnnnnnnnnnnnnnnnnnnnnnnnnnnnnnnnnnnnnnnnnnnnnnnnnnnnnnnnnnnnnnnnnnnnnnnnnnnnnnnnnnnnnnnnnnnnnnnnnnnnnnnnnnnnnnnnnnnnnnnnnnnnnnnnnnnnnnnnnnnnnnnnnnnnnnnnnnnnnnnnnnnnnnnnnnnnnnnnnnnnnnnnnnnnnnnnnnnnnnnnnnnnnnnnnnnnnnnnnnnnnnnnnnnnnnnnnnnnnnnnnnnnnnnnnnnnnnnnnnnnnnnnnnnnnnnnnnnnnnnnnnnnnnnnnnnnnnnnnnnnnnnnnnnnnnnnnnnnnnnnnnnnnnnnnnnnnnnnnnnnnnnnnnnnnnnnnnnnnnnnnnnnnnnnnnnnnnnnnnnnnnnnnnnnnnnnnnnnnnnnnnnnnnnnnnnnnnnnnnnnnnnnnnnnnnnnnnnnnnnnnnnnnnnnnnnnnnnnnnnnnnnnnnnnnnnnnnnnnnnnnnnnnnnnnnnnnnnnnnnnnnnnnnnnnnnnnnnnnnnnnnnnnnnnnnnnnnnnnnnnnnnnnnnnnnnnnnnnnnnnnnnnnnnnnnnnnnnnnnnnnnnnnnnnnnnnnnnnnnnnnnnnnnnnnnnnnnnnnnnnnnnnnnnnnnnnnnnnnnnnnnnnnnnnnnnnnnnnnnnnnnnnnnnnnnnnnnnnnnnnnnnnnnnnnnnnnnnnnnnnnnnnnnnnnnnnnnnnnnnnnnnnnnnnnnnnnnnnnnnnnnnnnnnnnnnnnnnnnnnnnnnnnnnnnnnnnnnnnnnnnnnnnnnnnnnnnnnnnnnnnnnnnnnnnnnnnnnnnnnnnnnnnnnnnnnnnnnnnnnnnnnnnnnnnnnnnnnnnnnnnnnnnnnnnnnnnnnnnnnnnnnnnnnnnnnnnnnnnnnnnnnnnnnnnnnnnnnnnnnnnnnnnnnnnnnnnnnnnnnnnnnnnnnnnnnnnnnnnnnnnnnnnnnnnnnnnnnnnnnnnnnnnnnnnnnnnnnnnnnnnnnnnnnnnnnnnnnnnnnnnnnnnnnnnnnnnnnnnnnnnnnnnnnnnnnnnnnnnnnnnnnnnnnnnnnnnnnnnnnnnnnnnnnnnnnnnnnnnnnnnnnnnnnnnnnnnnnnnnnnnnnnnnnnnnnnnnnnnnnnnnnnnnnnnnnnnnnnnnnnnnnnnnnnnnnnnnnnnnnnnnnnnnnnnnnnnnnnnnnnnnnnnnnnnnnnnnnnnnnnnnnnnnnnnnnnnnnnnnnnnnnnnnnnnnnnnnnnnnnnnnnnnnnnnnnnnnnnnnnnnnnnnnnnnnnnnnnnnnnnnnnnnnnnnnnnnnnnnnnnnnnnnnnnnnnnnnnnnnnnnnnnnnnnnnnnnnnnnnnnnnnnnnnnnnnnnnnnnnnnnnnnnnnnnnnnnnnnnnnnnnnnnnnnnnnnnnnnnnnnnnnnnnnnnnnnnnnnnnnnnnnnnnnnnnnnnnnnnnnnnnnnnnnnnnnnnnnnnnnnnnnnnnnnnnnnnnnnnnnnnnnnnnnnnnnnnnnnnnnnnnnnnnnnnnnnnnnnnnnnnnnnnnnnnnnnnnnnnnnnnnnnnnnnnnnnnnnnnnnnnnnnnnnnnnnnnnnnnnnnnnnnnnnnnnnnnnnnnnnnnnnnnnnnnnnnnnnnnnnnnnnnnnnnnnnnnnnnnnnnnnnnnnnnnnnnnnnnnnnnnnnnnnnnnnnnnnnnnnnnnnnnnnnnnnnnnnnnnnnnnnnnnnnnnnnnnnnnnnnnnnnnnnnnnnnnnnnnnnnnnnnnnnnnnnnnnnnnnnnnnnnnnnnnnnnnnnnnnnnnnnnnnnnnnnnnnnnnnnnnnnnnnnnnnnnnnnnnnnnnnnnnnnnnnnnnnnnnnnnnnnnnnnnnnnnnnnnnnnnnnnnnnnnnnnnnnnnnnnnnnnnnnnnnnnnnnnnnnnnnnnnnnnnnnnnnnnnnnnnnnnnnnnnnnnnnnnnnnnnnnnnnnnnnnnnnnnnnnnnnnnnnnnnnnnnnnnnnnnnnnnnnnnnnnnnnnnnnnnnnnnnnnnnnnnnnnnnnnnnnnnnnnnnnnnnnnnnnnnnnnnnnnnnnnnnnnnnnnnnnnnnnnnnnnnnnnnnnnnnnnnnnnnnnnnnnnnnnnnnnnnnnnnnnnnnnnnnnnnnnnnnnnnnnnnnnnnnnnnnnnnnnnnnnnnnnnnnnnnnnnnnnnnnnnnnnnnnnnnnnnnnnnnnnnnnnnnnnnnnnnnnnnnnnnnnnnnnnnnnnnnnnnnnnnnnnnnnnnnnnnnnnnnnnnnnnnnnnnnnnnnnnnnnnnnnnnnnnnnnnnnnnnnnnnnnnnnnnnnnnnnnnnnnnnnnnnnnnnnnnnnnnnnnnnnnnnnnnnnnnnnnnnnnnnnnnnnnnnnnnnnnnnnnnnnnnnnnnnnnnnnnnnnnnnnnnnnnnnnnnnnnnnnnnnnnnnnnnnnnnnnnnnnnnnnnnnnnnnnnnnnnnnnnnnnnnnnnnnnnnnnnnnnnnnnnnnnnnnnnnnnnnnnnnnnnnnnnnnnnnnnnnnnnnnnnnnnnnnnnnnnnnnnnnnnnnnnnnnnnnnnnnnnnnnnnnnnnnnnnnnnnnnnnnnnnnnnnnnnnnnnnnnnnnnnnnnnnnnnnnnnnnnnnnnnnnnnnnnnnnnnnnnnnnnnnnnnnnnnnnnnnnnnnnnnnnnnnnnnnnnnnnnnnnnnnnnnnnnnnnnnnnnnnnnnnnnnnnnnnnnnnnnnnnnnnnnnnnnnnnnnnnnnnnnnnnnnnnnnnnnnnnnnnnnnnnnnnnnnnnnnnnnnnnnnnnnnnnnnnnnnnnnnnnnnnnnnnnnnnnnnnnnnnnnnnnnnnnnnnnnnnnnnnnnnnnnnnnnnnnnnnnnnnnnnnnnnnnnnnnnnnnnnnnnnnnnnnnnnnnnnnnnnnnnnnnnnnnnnnnnnnnnnnnnnnnnnnnnnnnnnnnnnnnnnnnnnnnnnnnnnnnnnnnnnnnnnnnnnnnnnnnnnnnnnnnnnnnnnnnnnnnnnnnnnnnnnnnnnnnnnnnnnnnnnnnnnnnnnnnnnnnnnnnnnnnnnnnnnnnnnnnnnnnnnnnnnnnnnnnnnnnnnnnnnnnnnnnnnnnnnnnnnnnnnnnnnnnnnnnnnnnnnnnnnnnnnnnnnnnnnnnnnnnnnnnnnnnnnnnnnnnnnnnnnnnnnnnnnnnnnnnnnnnnnnnnnnnnnnnnnnnnnnnnnnnnnnnnnnnnnnnnnnnnnnnnnnnnnnnnnnnnnnnnnnnnnnnnnnnnnnnnnnnnnnnnnnnnnnnnnnnnnnnnnnnnnnnnnnnnnnnnnnnnnnnnnnnnnnnnnnnnnnnnnnnnnnnnnnnnnnnnnnnnnnnnnnnnnnnnnnnnnnnnnnnnnnnnnnnnnnnnnnnnnnnnnnnnnnnnnnnnnnnnnnnnnnnnnnnnnnnnnnnnnnnnnnnnnnnnnnnnnnnnnnnnnnnnnnnnnnnnnnnnnnnnnnnnnnnnnnnnnnnnnnnnnnnnnnnnnnnnnnnnnnnnnnnnnnnnnnnnnnnnnnnnnnnnnnnnnnnnnnnnnnnnnnnnnnnnnnnnnnnnnnnnnnnnnnnnnnnnnnnnnnnnnnnnnnnnnnnnnnnnnnnnnnnnnnnnnnnnnnnnnnnnnnnnnnnnnnnnnnnnnnnnnnnnnnnnnnnnnnnnnnnnnnnnnnnnnnnnnnnnnnnnnnnnnnnnnnnnnnnnnnnnnnnnnnnnnnnnnnnnnnnnnnnnnnnnnnnnnnnnnnnnnnnnnnnnnnnnnnnnnnnnnnnnnnnnnnnnnnnnnnnnnnnnnnnnnnnnnnnnnnnnnnnnnnnnnnnnnnnnnnnnnnnnnnnnnnnnnnnnnnnnnnnnnnnnnnnnnnnnnnnnnnnnnnnnnnnnnnnnnnnnnnnnnnnnnnnnnnnnnnnnnnnnnnnnnnnnnnnnnnnnnnnnnnnnnnnnnnnnnnnnnnnnnnnnnnnnnnnnnnnnnnnnnnnnnnnnnnnnnnnnnnnnnnnnnnnnnnnnnnnnnnnnnnnnnnnnnnnnnnnnnnnnnnnnnnnnnnnnnnnnnnnnnnnnnnnnnnnnnnnnnnnnnnnnnnnnnnnnnnnnnnnnnnnnnnnnnnnnnnnnnnnnnnnnnnnnnnnnnnnnnnnnnnnnnnnnnnnnnnnnnnnnnnnnnnnnnnnnnnnnnnnnnnnnnnnnnnnnnnnnnnnnnnnnnnnnnnnnnnnnnnnnnnnnnnnnnnnnnnnnnnnnnnnnnnnnnnnnnnnnnnnnnnnnnnnnnnnnnnnnnnnnnnnnnnnnnnnnnnnnnnnnnnnnnnnnnnnnnnnnnnnnnnnnnnnnnnnnnnnnnnnnnnnnnnnnnnnnnnnnnnnnnnnnnnnnnnnnnnnnnnnnnnnnnnnnnnnnnnnnnnnnnnnnnnnnnnnnnnnnnnnnnnnnnnnnnnnnnnnnnnnnnnnnnnnnnnnnnnnnnnnnnnnnnnnnnnnnnnnnnnnnnnnnnnnnnnnnnnnnnnnnnnnnnnnnnnnnnnnnnnnnnnnnnnnnnnnnnnnnnnnnnnnnnnnnnnnnnnnnnnnnnnnnnnnnnnnnnnnnnnnnnnnnnnnnnnnnnnnnnnnnnnnnnnnnnnnnnnnnnnnnnnnnnnnnnnnnnnnnnnnnnnnnnnnnnnnnnnnnnnnnnnnnnnnnnnnnnnnnnnnnnnnnnnnnnnnnnnnnnnnnnnnnnnnnnnnnnnnnnnnnnnnnnnnnnnnnnnnnnnnnnnnnnnnnnnnnnnnnnnnnnnnnnnnnnnnnnnnnnnnnnnnnnnnnnnnnnnnnnnnnnnnnnnnnnnnnnnnnnnnnnnnnnnnnnnnnnnnnnnnnnnnnnnnnnnnnnnnnnnnnnnnnnnnnnnnnnnnnnnnnnnnnnnnnnnnnnnnnnnnnnnnnnnnnnnnnnnnnnnnnnnnnnnnnnnnnnnnnnnnnnnnnnnnnnnnnnnnnnnnnnnnnnnnnnnnnnnnnnnnnnnnnnnnnnnnnnnnnnnnnnnnnnnnnnnnnnnnnnnnnnnnnnnnnnnnnnnnnnnnnnnnnnnnnnnnnnnnnnnnnnnnnnnnnnnnnnnnnnnnnnnnnnnnnnnnnnnnnnnnnnnnnnnnnnnnnnnnnnnnnnnnnnnnnnnnnnnnnnnnnnnnnnnnnnnnnnnnnnnnnnnnnnnnnnnnnnnnnnnnnnnnnnnnnnnnnnnnnnnnnnnnnnnnnnnnnnnnnnnnnnnnnnnnnnnnnnnnnnnnnnnnnnnnnnnnnnnnnnnnnnnnnnnnnnnnnnnnnnnnnnnnnnnnnnnnnnnnnnnnnnnnnnnnnnnnnnnnnnnnnnnnnnnnnnnnnnnnnnnnnnnnnnnnnnnnnnnnnnnnnnnnnnnnnnnnnnnnnnnnnnnnnnnnnnnnnnnnnnnnnnnnnnnnnnnnnnnnnnnnnnnnnnnnnnnnnnnnnnnnnnnnnnnnnnnnnnnnnnnnnnnnnnnnnnnnnnnnnnnnnnnnnnnnnnnnnnnnnnnnnnnnnnnnnnnnnnnnnnnnnnnnnnnnnnnnnnnnnnnnnnnnnnnnnnnnnnnnnnnnnnnnnnnnnnnnnnnnnnnnnnnnnnnnnnnnnnnnnnnnnnnnnnnnnnnnnnnnnnnnnnnnnnnnnnnnnnnnnnnnnnnnnnnnnnnnnnnnnnnnnnnnnnnnnnnnnnnnnnnnnnnnnnnnnnnnnnnnnnnnnnnnnnnnnnnnnnnnnnnnnnnnnnnnnnnnnnnnnnnnnnnnnnnnnnnnnnnnnnnnnnnnnnnnnnnnnnnnnnnnnnnnnnnnnnnnnnnnnnnnnnnnnnnnnnnnnnnnnnnnnnnnnnnnnnnnnnnnnnnnnnnnnnnnnnnnnnnnnnnnnnnnnnnnnnnnnnnnnnnnnnnnnnnnnnnnnnnnnnnnnnnnnnnnnnnnnnnnnnnnnnnnnnnnnnnnnnnnnnnnnnnnnnnnnnnnnnnnnnnnnnnnnnnnnnnnnnnnnnnnnnnnnnnnnnnnnnnnnnnnnnnnnnnnnnnnnnnnnnnnnnnnnnnnnnnnnnnnnnnnnnnnnnnnnnnnnnnnnnnnnnnnnnnnnnnnnnnnnnnnnnnnnnnnnnnnnnnnnnnnnnnnnnnnnnnnnnnnnnnnnnnnnnnnnnnnnnnnnnnnnnnnnnnnnnnnnnnnnnnnnnnnnnnnnnnnnnnnnnnnnnnnnnnnnnnnnnnnnnnnnnnnnnnnnnnnnnnnnnnnnnnnnnnnnnnnnnnnnnnnnnnnnnnnnnnnnnnnnnnnnnnnnnnnnnnnnnnnnnnnnnnnnnnnnnnnnnnnnnnnnnnnnnnnnnnnnnnnnnnnnnnnnnnnnnnnnnnnnnnnnnnnnnnnnnnnnnnnnnnnnnnnnnnnnnnnnnnnnnnnnnnnnnnnnnnnnnnnnnnnnnnnnnnnnnnnnnnnnnnnnnnnnnnnnnnnnnnnnnnnnnnnnnnnnnnnnnnnnnnnnnnnnnnnnnnnnnnnnnnnnnnnnnnnnnnnnnnnnnnnnnnnnnnnnnnnnnnnnnnnnnnnnnnnnnnnnnnnnnnnnnnnnnnnnnnnnnnnnnnnnnnnnnnnnnnnnnnnnnnnnnnnnnnnnnnnnnnnnnnnnnnnnnnnnnnnnnnnnnnnnnnnnnnnnnnnnnnnnnnnnnnnnnnnnnnnnnnnnnnnnnnnnnnnnnnnnnnnnnnnnnnnnnnnnnnnnnnnnnnnnnnnnnnnnnnnnnnnnnnnnnnnnnnnnnnnnnnnnnnnnnnnnnnnnnnnnnnnnnnnnnnnnnnnnnnnnnnnnnnnnnnnnnnnnnnnnnnnnnnnnnnnnnnnnnnnnnnnnnnnnnnnnnnnnnnnnnnnnnnnnnnnnnnnnnnnnnnnnnnnnnnnnnnnnnnnnnnnnnnnnnnnnnnnnnnnnnnnnnnnnnnnnnnnnnnnnnnnnnnnnnnnnnnnnnnnnnnnnnnnnnnnnnnnnnnnnnnnnnnnnnnnnnnnnnnnnnnnnnnnnnnnnnnnnnnnnnnnnnnnnnnnnnnnnnnnnnnnnnnnnnnnnnnnnnnnnnnnnnnnnnnnnnnnnnnnnnnnnnnnnnnnnnnnnnnnnnnnnnnnnnnnnnnnnnnnnnnnnnnnnnnnnnnnnnnnnnnnnnnnnnnnnnnnnnnnnnnnnnnnnnnnnnnnnnnnnnnnnnnnnnnnnnnnnnnnnnnnnnnnnnnnnnnnnnnnnnnnnnnnnnnnnnnnnnnnnnnnnnnnnnnnnnnnnnnnnnnnnnnnnnnnnnnnnnnnnnnnnnnnnnnnnnnnnnnnnnnnnnnnnnnnnnnnnnnnnnnnnnnnnnnnnnnnnnnnnnnnnnnnnnnnnnnnnnnnnnnnnnnnnnnnnnnnnnnnnnnnnnnnnnnnnnnnnnnnnnnnnnnnnnnnnnnnnnnnnnnnnnnnnnnnnnnnnnnnnnnnnnnnnnnnnnnnnnnnnnnnnnnnnnnnnnnnnnnnnnnnnnnnnnnnnnnnnnnnnnnnnnnnnnnnnnnnnnnnnnnnnnnnnnnnnnnnnnnnnnnnnnnnnnnnnnnnnnnnnnnnnnnnnnnnnnnnnnnnnnnnnnnnnnnnnnnnnnnnnnnnnnnnnnnnnnnnnnnnnnnnnnnnnnnnnnnnnnnnnnnnnnnnnnnnnnnnnnnnnnnnnnnnnnnnnnnnnnnnnnnnnnnnnnnnnnnnnnnnnnnnnnnnnnnnnnnnnnnnnnnnnnnnnnnnnnnnnnnnnnnnnnnnnnnnnnnnnnnnnnnnnnnnnnnnnnnnnnnnnnnnnnnnnnnnnnnnnnnnnnnnnnnnnnnnnnnnnnnnnnnnnnnnnnnnnnnnnnnnnnnnnnnnnnnnnnnnnnnnnnnnnnnnnnnnnnnnnnnnnnnnnnnnnnnnnnnnnnnnnnnnnnnnnnnnnnnnnnnnnnnnnnnnnnnnnnnnnnnnnnnnnnnnnnnnnnnnnnnnnnnnnnnnnnnnnnnnnnnnnnnnnnnnnnnnnnnnnnnnnnnnnnnnnnnnnnnnnnnnnnnnnnnnnnnnnnnnnnnnnnnnnnnnnnnnnnnnnnnnnnnnnnnnnnnnnnnnnnnnnnnnnnnnnnnnnnnnnnnnnnnnnnnnnnnnnnnnnnnnnnnnnnnnnnnnnnnnnnnnnnnnnnnnnnnnnnnnnnnnnnnnnnnnnnnnnnnnnnnnnnnnnnnnnnnnnnnnnnnnnnnnnnnnnnnnnnnnnnnnnnnnnnnnnnnnnnnnnnnnnnnnnnnnnnnnnnnnnnnnnnnnnnnnnnnnnnnnnnnnnnnnnnnnnnnnnnnnnnnnnnnnnnnnnnnnnnnnnnnnnnnnnnnnnnnnnnnnnnnnnnnnnnnnnnnnnnnnnnnnnnnnnnnnnnnnnnnnnnnnnnnnnnnnnnnnnnnnnnnnnnnnnnnnnnnnnnnnnnnnnnnnnnnnnnnnnnnnnnnnnnnnnnnnnnnnnnnnnnnnnnnnnnnnnnnnnnnnnnnnnnnnnnnnnnnnnnnnnnnnnnnnnnnnnnnnnnnnnnnnnnnnnnnnnnnnnnnnnnnnnnnnnnnnnnnnnnnnnnnnnnnnnnnnnnnnnnnnnnnnnnnnnnnnnnnnnnnnnnnnnnnnnnnnnnnnnnnnnnnnnnnnnnnnnnnnnnnnnnnnnnnnnnnnnnnnnnnnnnnnnnnnnnnnnnnnnnnnnnnnnnnnnnnnnnnnnnnnnnnnnnnnnnnnnnnnnnnnnnnnnnnnnnnnnnnnnnnnnnnnnnnnnnnnnnnnnnnnnnnnnnnnnnnnnnnnnnnnnnnnnnnnnnnnnnnnnnnnnnnnnnnnnnnnnnnnnnnnnnnnnnnnnnnnnnnnnnnnnnnnnnnnnnnnnnnnnnnnnnnnnnnnnnnnnnnnnnnnnnnnnnnnnnnnnnnnnnnnnnnnnnnnnnnnnnnnnnnnnnnnnnnnnnnnnnnnnnnnnnnnnnnnnnnnnnnnnnnnnnnnnnnnnnnnnnnnnnnnnnnnnnnnnnnnnnnnnnnnnnnnnnnnnnnnnnnnnnnnnnnnnnnnnnnnnnnnnnnnnnnnnnnnnnnnnnnnnnnnnnnnnnnnnnnnnnnnnnnnnnnnnnnnnnnnnnnnnnnnnnnnnnnnnnnnnnnnnnnnnnnnnnnnnnnnnnnnnnnnnnnnnnnnnnnnnnnnnnnnnnnnnnnnnnnnnnnnnnnnnnnnnnnnnnnnnnnnnnnnnnnnnnnnnnnnnnnnnnnnnnnnnnnnnnnnnnnnnnnnnnnnnnnnnnnnnnnnnnnnnnnnnnnnnnnnnnnnnnnnnnnnnnnnnnnnnnnnnnnnnnnnnnnnnnnnnnnnnnnnnnnnnnnnnnnnnnnnnnnnnnnnnnnnnnnnnnnnnnnnnnnnnnnnnnnnnnnnnnnnnnnnnnnnnnnnnnnnnnnnnnnnnnnnnnnnnnnnnnnnnnnnnnnnnnnnnnnnnnnnnnnnnnnnnnnnnnnnnnnnnnnnnnnnnnnnnnnnnnnnnnnnnnnnnnnnnnnnnnnnnnnnnnnnnnnnnnnnnnnnnnnnnnnnnnnnnnnnnnnnnnnnnnnnnnnnnnnnnnnnnnnnnnnnnnnnnnnnnnnnnnnnnnnnnnnnnnnnnnnnnnnnnnnnnnnnnnnnnnnnnnnnnnnnnnnnnnnnnnnnnnnnnnnnnnnnnnnnnnnnnnnnnnnnnnnnnnnnnnnnnnnnnnnnnnnnnnnnnnnnnnnnnnnnnnnnnnnnnnnnnnnnnnnnnnnnnnnnnnnnnnnnnnnnnnnnnnnnnnnnnnnnnnnnnnnnnnnnnnnnnnnnnnnnnnnnnnnnnnnnnnnnnnnnnnnnnnnnnnnnnnnnnnnnnnnnnnnnnnnnnnnnnnnnnnnnnnnnnnnnnnnnnnnnnnnnnnnnnnnnnnnnnnnnnnnnnnnnnnnnnnnnnnnnnnnnnnnnnnnnnnnnnnnnnnnnnnnnnnnnnnnnnnnnnnnnnnnnnnnnnnnnnnnnnnnnnnnnnnnnnnnnnnnnnnnnnnnnnnnnnnnnnnnnnnnnnnnnnnnnnnnnnnnnnnnnnnnnnnnnnnnnnnnnnnnnnnnnnnnnnnnnnnnnnnnnnnnnnnnnnnnnnnnnnnnnnnnnnnnnnnnnnnnnnnnnnnnnnnnnnnnnnnnnnnnnnnnnnnnnnnnnnnnnnnnnnnnnnnnnnnnnnnnnnnnnnnnnnnnnnnnnnnnnnnnnnnnnnnnnnnnnnnnnnnnnnnnnnnnnnnnnnnnnnnnnnnnnnnnnnnnnnnnnnnnnnnnnnnnnnnnnnnnnnnnnnnnnnnnnnnnnnnnnnnnnnnnnnnnnnnnnnnnnnnnnnnnnnnnnnnnnnnnnnnnnnnnnnnnnnnnnnnnnnnnnnnnnnnnnnnnnnnnnnnnnnnnnnnnnnnnnnnnnnnnnnnnnnnnnnnnnnnnnnnnnnnnnnnnnnnnnnnnnnnnnnnnnnnnnnnnnnnnnnnnnnnnnnnnnnnnnnnnnnnnnnnnnnnnnnnnnnnnnnnnnnnnnnnnnnnnnnnnnnnnnnnnnnnnnnnnnnnnnnnnnnnnnnnnnnnnnnnnnnnnnnnnnnnnnnnnnnnnnnnnnnnnnnnnnnnnnnnnnnnnnnnnnnnnnnnnnnnnnnnnnnnnnnnnnnnnnnnnnnnnnnnnnnnnnnnnnnnnnnnnnnnnnnnnnnnnnnnnnnnnnnnnnnnnnnnnnnnnnnnnnnnnnnnnnnnnnnnnnnnnnnnnnnnnnnnnnnnnnnnnnnnnnnnnnnnnnnnnnnnnnnnnnnnnnnnnnnnnnnnnnnnnnnnnnnnnnnnnnnnnnnnnnnnnnnnnnnnnnnnnnnnnnnnnnnnnnnnnnnnnnnnnnnnnnnnnnnnnnnnnnnnnnnnnnnnnnnnnnnnnnnnnnnnnnnnnnnnnnnnnnnnnnnnnnnnnnnnnnnnnnnnnnnnnnnnnnnnnnnnnnnnnnnnnnnnnnnnnnnnnnnnnnnnnnnnnnnnnnnnnnnnnnnnnnnnnnnnnnnnnnnnnnnnnnnnnnnnnnnnnnnnnnnnnnnnnnnnnnnnnnnnnnnnnnnnnnnnnnnnnnnnnnnnnnnnnnnnnnnnnnnnnnnnnnnnnnnnnnnnnnnnnnnnnnnnnnnnnnnnnnnnnnnnnnnnnnnnnnnnnnnnnnnnnnnnnnnnnnnnnnnnnnnnnnnnnnnnnnnnnnnnnnnnnnnnnnnnnnnnnnnnnnnnnnnnnnnnnnnnnnnnnnnnnnnnnnnnnnnnnnnnnnnnnnnnnnnnnnnnnnnnnnnnnnnnnnnnnnnnnnnnnnnnnnnnnnnnnnnnnnnnnnnnnnnnnnnnnnnnnnnnnnnnnnnnnnnnnnnnnnnnnnnnnnnnnnnnnnnnnnnnnnnnnnnnnnnnnnnnnnnnnnnnnnnnnnnnnnnnnnnnnnnnnnnnnnnnnnnnnnnnnnnnnnnnnnnnnnnnnnnnnnnnnnnnnnnnnnnnnnnnnnnnnnnnnnnnnnnnnnnnnnnnnnnnnnnnnnnnnnnnnnnnnnnnnnnnnnnnnnnnnnnnnnnnnnnnnnnnnnnnnnnnnnnnnnnnnnnnnnnnnnnnnnnnnnnnnnnnnnnnnnnnnnnnnnnnnnnnnnnnnnnnnnnnnnnnnnnnnnnnnnnnnnnnnnnnnnnnnnnnnnnnnnnnnnnnnnnnnnnnnnnnnnnnnnnnnnnnnnnnnnnnnnnnnnnnnnnnnnnnnnnnnnnnnnnnnnnnnnnnnnnnnnnnnnnnnnnnnnnnnnnnnnnnnnnnnnnnnnnnnnnnnnnnnnnnnnnnnnnnnnnnnnnnnnnnnnnnnnnnnnnnnnnnnnnnnnnnnnnnnnnnnnnnnnnnnnnnnnnnnnnnnnnnnnnnnnnnnnnnnnnnnnnnnnnnnnnnnnnnnnnnnnnnnnnnnnnnnnnnnnnnnnnnnnnnnnnnnnnnnnnnnnnnnnnnnnnnnnnnnnnnnnnnnnnnnnnnnnnnnnnnnnnnnnnnnnnnnnnnnnnnnnnnnnnnnnnnnnnnnnnnnnnnnnnnnnnnnnnnnnnnnnnnnnnnnnnnnnnnnnnnnnnnnnnnnnnnnnnnnnnnnnnnnnnnnnnnnnnnnnnnnnnnnnnnnnnnnnnnnnnnnnnnnnnnnnnnnnnnnnnnnnnnnnnnnnnnnnnnnnnnnnnnnnnnnnnnnnnnnnnnnnnnnnnnnnnnnnnnnnnnnnnnnnnnnnnnnnnnnnnnnnnnnnnnnnnnnnnnnnnnnnnnnnnnnnnnnnnnnnnnnnnnnnnnnnnnnnnnnnnnnnnnnnnnnnnnnnnnnnnnnnnnnnnnnnnnnnnnnnnnnnnnnnnnnnnnnnnnnnnnnnnnnnnnnnnnnnnnnnnnnnnnnnnnnnnnnnnnnnnnnnnnnnnnnnnnnnnnnnnnnnnnnnnnnnnnnnnnnnnnnnnnnnnnnnnnnnnnnnnnnnnnnnnnnnnnnnnnnnnnnnnnnnnnnnnnnnnnnnnnnnnnnnnnnnnnnnnnnnnnnnnnnnnnnnnnnnnnnnnnnnnnnnnnnnnnnnnnnnnnnnnnnnnnnnnnnnnnnnnnnnnnnnnnnnnnnnnnnnnnnnnnnnnnnnnnnnnnnnnnnnnnnnnnnnnnnnnnnnnnnnnnnnnnnnnnnnnnnnnnnnnnnnnnnnnnnnnnnnnnnnnnnnnnnnnnnnnnnnnnnnnnnnnnnnnnnnnnnnnnnnnnnnnnnnnnnnnnnnnnnnnnnnnnnnnnnnnnnnnnnnnnnnnnnnnnnnnnnnnnnnnnnnnnnnnnnnnnnnnnnnnnnnnnnnnnnnnnnnnnnnnnnnnnnnnnnnnnnnnnnnnnnnnnnnnnnnnnnnnnnnnnnnnnnnnnnnnnnnnnnnnnnnnnnnnnnnnnnnnnnnnnnnnnnnnnnnnnnnnnnnnnnnnnnnnnnnnnnnnnnnnnnnnnnnnnnnnnnnnnnnnnnnnnnnnnnnnnnnnnnnnnnnnnnnnnnnnnnnnnnnnnnnnnnnnnnnnnnnnnnnnnnnnnnnnnnnnnnnnnnnnnnnnnnnnnnnnnnnnnnnnnnnnnnnnnnnnnnnnnnnnnnnnnnnnnnnnnnnnnnnnnnnnnnnnnnnnnnnnnnnnnnnnnnnnnnnnnnnnnnnnnnnnnnnnnnnnnnnnnnnnnnnnnnnnnnnnnnnnnnnnnnnnnnnnnnnnnnnnnnnnnnnnnnnnnnnnnnnnnnnnnnnnnnnnnnnnnnnnnnnnnnnnnnnnnnnnnnnnnnnnnnnnnnnnnnnnnnnnnnnnnnnnnnnnnnnnnnnnnnnnnnnnnnnnnnnnnnnnnnnnnnnnnnnnnnnnnnnnnnnnnnnnnnnnnnnnnnnnnnnnnnnnnnnnnnnnnnnnnnnnnnnnnnnnnnnnnnnnnnnnnnnnnnnnnnnnnnnnnnnnnnnnnnnnnnnnnnnnnnnnnnnnnnnnnnnnnnnnnnnnnnnnnnnnnnnnnnnnnnnnnnnnnnnnnnnnnnnnnnnnnnnnnnnnnnnnnnnnnnnnnnnnnnnnnnnnnnnnnnnnnnnnnnnnnnnnnnnnnnnnnnnnnnnnnnnnnnnnnnnnnnnnnnnnnnnnnnnnnnnnnnnnnnnnnnnnnnnnnnnnnnnnnnnnnnnnnnnnnnnnnnnnnnnnnnnnnnnnnnnnnnnnnnnnnnnnnnnnnnnnnnnnnnnnnnnnnnnnnnnnnnnnnnnnnnnnnnnnnnnnnnnnnnnnnnnnnnnnnnnnnnnnnnnnnnnnnnnnnnnnnnnnnnnnnnnnnnnnnnnnnnnnnnnnnnnnnnnnnnnnnnnnnnnnnnnnnnnnnnnnnnnnnnnnnnnnnnnnnnnnnnnnnnnnnnnnnnnnnnnnnnnnnnnnnnnnnnnnnnnnnnnnnnnnnnnnnnnnnnnnnnnnnnnnnnnnnnnnnnnnnnnnnnnnnnnnnnnnnnnnnnnnnnnnnnnnnnnnnnnnnnnnnnnnnnnnnnnnnnnnnnnnnnnnnnnnnnnnnnnnnnnnnnnnnnnnnnnnnnnnnnnnnnnnnnnnnnnnnnnnnnnnnnnnnnnnnnnnnnnnnnnnnnnnnnnnnnnnnnnnnnnnnnnnnnnnnnnnnnnnnnnnnnnnnnnnnnnnnnnnnnnnnnnnnnnnnnnnnnnnnnnnnnnnnnnnnnnnnnnnnnnnnnnnnnnnnnnnnnnnnnnnnnnnnnnnnnnnnnnnnnnnnnnnnnnnnnnnnnnnnnnnnnnnnnnnnnnnnnnnnnnnnnnnnnnnnnnnnnnnnnnnnnnnnnnnnnnnnnnnnnnnnnnnnnnnnnnnnnnnnnnnnnnnnnnnnnnnnnnnnnnnnnnnnnnnnnnnnnnnnnnnnnnnnnnnnnnnnnnnnnnnnnnnnnnnnnnnnnnnnnnnnnnnnnnnnnnnnnnnnnnnnnnnnnnnnnnnnnnnnnnnnnnnnnnnnnnnnnnnnnnnnnnnnnnnnnnnnnnnnnnnnnnnnnnnnnnnnnnnnnnnnnnnnnnnnnnnnnnnnnnnnnnnnnnnnnnnnnnnnnnnnnnnnnnnnnnnnnnnnnnnnnnnnnnnnnnnnnnnnnnnnnnnnnnnnnnnnnnnnnnnnnnnnnnnnnnnnnnnnnnnnnnnnnnnnnnnnnnnnnnnnnnnnnnnnnnnnnnnnnnnnnnnnnnnnnnnnnnnnnnnnnnnnnnnnnnnnnnnnnnnnnnnnnnnnnnnnnnnnnnnnnnnnnnnnnnnnnnnnnnnnnnnnnnnnnnnnnnnnnnnnnnnnnnnnnnnnnnnnnnnnnnnnnnnnnnnnnnnnnnnnnnnnnnnnnnnnnnnnnnnnnnnnnnnnnnnnnnnnnnnnnnnnnnnnnnnnnnnnnnnnnnnnnnnnnnnnnnnnnnnnnnnnnnnnnnnnnnnnnnnnnnnnnnnnnnnnnnnnnnnnnnnnnnnnnnnnnnnnnnnnnnnnnnnnnnnnnnnnnnnnnnnnnnnnnnnnnnnnnnnnnnnnnnnnnnnnnnnnnnnnnnnnnnnnnnnnnnnnnnnnnnnnnnnnnnnnnnnnnnnnnnnnnnnnnnnnnnnnnnnnnnnnnnnnnnnnnnnnnnnnnnnnnnnnnnnnnnnnnnnnnnnnnnnnnnnnnnnnnnnnnnnnnnnnnnnnnnnnnnnnnnnnnnnnnnnnnnnnnnnnnnnnnnnnnnnnnnnnnnnnnnnnnnnnnnnnnnnnnnnnnnnnnnnnnnnnnnnnnnnnnnnnnnnnnnnnnnnnnnnnnnnnnnnnnnnnnnnnnnnnnnnnnnnnnnnnnnnnnnnnnnnnnnnnnnnnnnnnnnnnnnnnnnnnnnnnnnnnnnnnnnnnnnnnnnnnnnnnnnnnnnnnnnnnnnnnnnnnnnnnnnnnnnnnnnnnnnnnnnnnnnnnnnnnnnnnnnnnnnnnnnnnnnnnnnnnnnnnnnnnnnnnnnnnnnnnnnnnnnnnnnnnnnnnnnnnnnnnnnnnnnnnnnnnnnnnnnnnnnnnnnnnnnnnnnnnnnnnnnnnnnnnnnnnnnnnnnnnnnnnnnnnnnnnnnnnnnnnnnnnnnnnnnnnnnnnnnnnnnnnnnnnnnnnnnnnnnnnnnnnnnnnnnnnnnnnnnnnnnnnnnnnnnnnnnnnnnnnnnnnnnnnnnnnnnnnnnnnnnnnnnnnnnnnnnnnnnnnnnnnnnnnnnnnnnnnnnnnnnnnnnnnnnnnnnnnnnnnnnnnnnnnnnnnnnnnnnnnnnnnnnnnnnnnnnnnnnnnnnnnnnnnnnnnnnnnnnnnnnnnnnnnnnnnnnnnnnnnnnnnnnnnnnnnnnnnnnnnnnnnnnnnnnnnnnnnnnnnnnnnnnnnnnnnnnnnnnnnnnnnnnnnnnnnnnnnnnnnnnnnnnnnnnnnnnnnnnnnnnnnnnnnnnnnnnnnnnnnnnnnnnnnnnnnnnnnnnnnnnnnnnnnnnnnnnnnnnnnnnnnnnnnnnnnnnnnnnnnnnnnnnnnnnnnnnnnnnnnnnnnnnnnnnnnnnnnnnnnnnnnnnnnnnnnnnnnnnnnnnnnnnnnnnnnnnnnnnnnnnnnnnnnnnnnnnnnnnnnnnnnnnnnnnnnnnnnnnnnnnnnnnnnnnnnnnnnnnnnnnnnnnnnnnnnnnnnnnnnnnnnnnnnnnnnnnnnnnnnnnnnnnnnnnnnnnnnnnnnnnnnnnnnnnnnnnnnnnnnnnnnnnnnnnnnnnnnnnnnnnnnnnnnnnnnnnnnnnnnnnnnnnnnnnnnnnnnnnnnnnnnnnnnnnnnnnnnnnnnnnnnnnnnnnnnnnnnnnnnnnnnnnnnnnnnnnnnnnnnnnnnnnnnnnnnnnnnnnnnnnnnnnnnnnnnnnnnnnnnnnnnnnnnnnnnnnnnnnnnnnnnnnnnnnnnnnnnnnnnnnnnnnnnnnnnnnnnnnnnnnnnnnnnnnnnnnnnnnnnnnnnnnnnnnnnnnnnnnnnnnnnnnnnnnnnnnnnnnnnnnnnnnnnnnnnnnnnnnnnnnnnnnnnnnnnnnnnnnnnnnnnnnnnnnnnnnnnnnnnnnnnnnnnnnnnnnnnnnnnnnnnnnnnnnnnnnnnnnnnnnnnnnnnnnnnnnnnnnnnnnnnnnnnnnnnnnnnnnnnnnnnnnnnnnnnnnnnnnnnnnnnnnnnnnnnnnnnnnnnnnnnnnnnnnnnnnnnnnnnnnnnnnnnnnnnnnnnnnnnnnnnnnnnnnnnnnnnnnnnnnnnnnnnnnnnnnnnnnnnnnnnnnnnnnnnnnnnnnnnnnnnnnnnnnnnnnnnnnnnnnnnnnnnnnnnnnnnnnnnnnnnnnnnnnnnnnnnnnnnnnnnnnnnnnnnnnnnnnnnnnnnnnnnnnnnnnnnnnnnnnnnnnnnnnnnnnnnnnnnnnnnnnnnnnnnnnnnnnnnnnnnnnnnnnnnnnnnnnnnnnnnnnnnnnnnnnnnnnnnnnnnnnnnnnnnnnnnnnnnnnnnnnnnnnnnnnnnnnnnnnnnnnnnnnnnnnnnnnnnnnnnnnnnnnnnnnnnnnnnnnnnnnnnnnnnnnnnnnnnnnnnnnnnnnnnnnnnnnnnnnnnnnnnnnnnnnnnnnnnnnnnnnnnnnnnnnnnnnnnnnnnnnnnnnnnnnnnnnnnnnnnnnnnnnnnnnnnnnnnnnnnnnnnnnnnnnnnnnnnnnnnnnnnnnnnnnnnnnnnnnnnnnnnnnnnnnnnnnnnnnnnnnnnnnnnnnnnnnnnnnnnnnnnnnnnnnnnnnnnnnnnnnnnnnnnnnnnnnnnnnnnnnnnnnnnnnnnnnnnnnnnnnnnnnnnnnnnnnnnnnnnnnnnnnnnnnnnnnnnnnnnnnnnnnnnnnnnnnnnnnnnnnnnnnnnnnnnnnnnnnnnnnnnnnnnnnnnnnnnnnnnnnnnnnnnnnnnnnnnnnnnnnnnnnnnnnnnnnnnnnnnnnnnnnnnnnnnnnnnnnnnnnnnnnnnnnnnnnnnnnnnnnnnnnnnnnnnnnnnnnnnnnnnnnnnnnnnnnnnnnnnnnnnnnnnnnnnnnnnnnnnnnnnnnnnnnnnnnnnnnnnnnnnnnnnnnnnnnnnnnnnnnnnnnnnnnnnnnnnnnnnnnnnnnnnnnnnnnnnnnnnnnnnnnnnnnnnnnnnnnnnnnnnnnnnnnnnnnnnnnnnnnnnnnnnnnnnnnnnnnnnnnnnnnnnnnnnnnnnnnnnnnnnnnnnnnnnnnnnnnnnnnnnnnnnnnnnnnnnnnnnnnnnnnnnnnnnnnnnnnnnnnnnnnnnnnnnnnnnnnnnnnnnnnnnnnnnnnnnnnnnnnnnnnnnnnnnnnnnnnnnnnnnnnnnnnnnnnnnnnnnnnnnnnnnnnnnnnnnnnnnnnnnnnnnnnnnnnnnnnnnnnnnnnnnnnnnnnnnnnnnnnnnnnnnnnnnnnnnnnnnnnnnnnnnnnnnnnnnnnnnnnnnnnnnnnnnnnnnnnnnnnnnnnnnnnnnnnnnnnnnnnnnnnnnnnnnnnnnnnnnnnnnnnnnnnnnnnnnnnnnnnnnnnnnnnnnnnnnnnnnnnnnnnnnnnnnnnnnnnnnnnnnnnnnnnnnnnnnnnnnnnnnnnnnnnnnnnnnnnnnnnnnnnnnnnnnnnnnnnnnnnnnnnnnnnnnnnnnnnnnnnnnnnnnnnnnnnnnnnnnnnnnnnnnnnnnnnnnnnnnnnnnnnnnnnnnnnnnnnnnnnnnnnnnnnnnnnnnnnnnnnnnnnnnnnnnnnnnnnnnnnnnnnnnnnnnnnnnnnnnnnnnnnnnnnnnnnnnnnnnnnnnnnnnnnnnnnnnnnnnnnnnnnnnnnnnnnnnnnnnnnnnnnnnnnnnnnnnnnnnnnnnnnnnnnnnnnnnnnnnnnnnnnnnnnnnnnnnnnnnnnnnnnnnnnnnnnnnnnnnnnnnnnnnnnnnnnnnnnnnnnnnnnnnnnnnnnnnnnnnnnnnnnnnnnnnnnnnnnnnnnnnnnnnnnnnnnnnnnnnnnnnnnnnnnnnnnnnnnnnnnnnnnnnnnnnnnnnnnnnnnnnnnnnnnnnnnnnnnnnnnnnnnnnnnnnnnnnnnnnnnnnnnnnnnnnnnnnnnnnnnnnnnnnnnnnnnnnnnnnnnnnnnnnnnnnnnnnnnnnnnnnnnnnnnnnnnnnnnnnnnnnnnnnnnnnnnnnnnnnnnnnnnnnnnnnnnnnnnnnnnnnnnnnnnnnnnnnnnnnnnnnnnnnnnnnnnnnnnnnnnnnnnnnnnnnnnnnnnnnnnnnnnnnnnnnnnnnnnnnnnnnnnnnnnnnnnnnnnnnnnnnnnnnnnnnnnnnnnnnnnnnnnnnnnnnnnnnnnnnnnnnnnnnnnnnnnnnnnnnnnnnnnnnnnnnnnnnnnnnnnnnnnnnnnnnnnnnnnnnnnnnnnnnnnnnnnnnnnnnnnnnnnnnnnnnnnnnnnnnnnnnnnnnnnnnnnnnnnnnnnnnnnnnnnnnnnnnnnnnnnnnnnnnnnnnnnnnnnnnnnnnnnnnnnnnnnnnnnnnnnnnnnnnnnnnnnnnnnnnnnnnnnnnnnnnnnnnnnnnnnnnnnnnnnnnnnnnnnnnnnnnnnnnnnnnnnnnnnnnnnnnnnnnnnnnnnnnnnnnnnnnnnnnnnnnnnnnnnnnnnnnnnnnnnnnnnnnnnnnnnnnnnnnnnnnnnnnnnnnnnnnnnnnnnnnnnnnnnnnnnnnnnnnnnnnnnnnnnnnnnnnnnnnnnnnnnnnnnnnnnnnnnnnnnnnnnnnnnnnnnnnnnnnnnnnnnnnnnnnnnnnnnnnnnnnnnnnnnnnnnnnnnnnnnnnnnnnnnnnnnnnnnnnnnnnnnnnnnnnnnnnnnnnnnnnnnnnnnnnnnnnnnnnnnnnnnnnnnnnnnnnnnnnnnnnnnnnnnnnnnnnnnnnnnnnnnnnnnnnnnnnnnnnnnnnnnnnnnnnnnnnnnnnnnnnnnnnnnnnnnnnnnnnnnnnnnnnnnnnnnnnnnnnnnnnnnnnnnnnnnnnnnnnnnnnnnnnnnnnnnnnnnnnnnnnnnnnnnnnnnnnnnnnnnnnnnnnnnnnnnnnnnnnnnnnnnnnnnnnnnnnnnnnnnnnnnnnnnnnnnnnnnnnnnnnnnnnnnnnnnnnnnnnnnnnnnnnnnnnnnnnnnnnnnnnnnnnnnnnnnnnnnnnnnnnnnnnnnnnnnnnnnnnnnnnnnnnnnnnnnnnnnnnnnnnnnnnnnnnnnnnnnnnnnnnnnnnnnnnnnnnnnnnnnnnnnnnnnnnnnnnnnnnnnnnnnnnnnnnnnnnnnnnnnnnnnnnnnnnnnnnnnnnnnnnnnnnnnnnnnnnnnnnnnnnnnnnnnnnnnnnnnnnnnnnnnnnnnnnnnnnnnnnnnnnnnnnnnnnnnnnnnnnnnnnnnnnnnnnnnnnnnnnnnnnnnnnnnnnnnnnnnnnnnnnnnnnnnnnnnnnnnnnnnnnnnnnnnnnnnnnnnnnnnnnnnnnnnnnnnnnnnnnnnnnnnnnnnnnnnnnnnnnnnnnnnnnnnnnnnnnnnnnnnnnnnnnnnnnnnnnnnnnnnnnnnnnnnnnnnnnnnnnnnnnnnnnnnnnnnnnnnnnnnnnnnnnnnnnnnnnnnnnnnnnnnnnnnnnnnnnnnnnnnnnnnnnnnnnnnnnnnnnnnnnnnnnnnnnnnnnnnnnnnnnnnnnnnnnnnnnnnnnnnnnnnnnnnnnnnnnnnnnnnnnnnnnnnnnnnnnnnnnnnnnnnnnnnnnnnnnnnnnnnnnnnnnnnnnnnnnnnnnnnnnnnnnnnnnnnnnnnnnnnnnnnnnnnnnnnnnnnnnnnnnnnnnnnnnnnnnnnnnnnnnnnnnnnnnnnnnnnnnnnnnnnnnnnnnnnnnnnnnnnnnnnnnnnnnnnnnnnnnnnnnnnnnnnnnnnnnnnnnnnnnnnnnnnnnnnnnnnnnnnnnnnnnnnnnnnnnnnnnnnnnnnnnnnnnnnnnnnnnnnnnnnnnnnnnnnnnnnnnnnnnnnnnnnnnnnnnnnnnnnnnnnnnnnnnnnnnnnnnnnnnnnnnnnnnnnnnnnnnnnnnnnnnnnnnnnnnnnnnnnnnnnnnnnnnnnnnnnnnnnnnnnnnnnnnnnnnnnnnnnnnnnnnnnnnnnnnnnnnnnnnnnnnnnnnnnnnnnnnnnnnnnnnnnnnnnnnnnnnnnnnnnnnnnnnnnnnnnnnnnnnnnnnnnnnnnnnnnnnnnnnnnnnnnnnnnnnnnnnnnnnnnnnnnnnnnnnnnnnnnnnnnnnnnnnnnnnnnnnnnnnnnnnnnnnnnnnnnnnnnnnnnnnnnnnnnnnnnnnnnnnnnnnnnnnnnnnnnnnnnnnnnnnnnnnnnnnnnnnnnnnnnnnnnnnnnnnnnnnnnnnnnnnnnnnnnnnnnnnnnnnnnnnnnnnnnnnnnnnnnnnnnnnnnnnnnnnnnnnnnnnnnnnnnnnnnnnnnnnnnnnnnnnnnnnnnnnnnnnnnnnnnnnnnnnnnnnnnnnnnnnnnnnnnnnnnnnnnnnnnnnnnnnnnnnnnnnnnnnnnnnnnnnnnnnnnnnnnnnnnnnnnnnnnnnnnnnnnnnnnnnnnnnnnnnnnnnnnnnnnnnnnnnnnnnnnnnnnnnnnnnnnnnnnnnnnnnnnnnnnnnnnnnnnnnnnnnnnnnnnnnnnnnnnnnnnnnnnnnnnnnnnnnnnnnnnnnnnnnnnnnnnnnnnnnnnnnnnnnnnnnnnnnnnnnnnnnnnnnnnnnnnnnnnnnnnnnnnnnnnnnnnnnnnnnnnnnnnnnnnnnnnnnnnnnnnnnnnnnnnnnnnnnnnnnnnnnnnnnnnnnnnnnnnnnnnnnnnnnnnnnnnnnnnnnnnnnnnnnnnnnnnnnnnnnnnnnnnnnnnnnnnnnnnnnnnnnnnnnnnnnnnnnnnnnnnnnnnnnnnnnnnnnnnnnnnnnnnnnnnnnnnnnnnnnnnnnnnnnnnnnnnnnnnnnnnnnnnnnnnnnnnnnnnnnnnnnnnnnnnnnnnnnnnnnnnnnnnnnnnnnnnnnnnnnnnnnnnnnnnnnnnnnnnnnnnnnnnnnnnnnnnnnnnnnnnnnnnnnnnnnnnnnnnnnnnnnnnnnnnnnnnnnnnnnnnnnnnnnnnnnnnnnnnnnnnnnnnnnnnnnnnnnnnnnnnnnnnnnnnnnnnnnnnnnnnnnnnnnnnnnnnnnnnnnnnnnnnnnnnnnnnnnnnnnnnnnnnnnnnnnnnnnnnnnnnnnnnnnnnnnnnnnnnnnnnnnnnnnnnnnnnnnnnnnnnnnnnnnnnnnnnnnnnnnnnnnnnnnnnnnnnnnnnnnnnnnnnnnnnnnnnnnnnnnnnnnnnnnnnnnnnnnnnnnnnnnnnnnnnnnnnnnnnnnnnnnnnnnnnnnnnnnnnnnnnnnnnnnnnnnnnnnnnnnnnnnnnnnnnnnnnnnnnnnnnnnnnnnnnnnnnnnnnnnnnnnnnnnnnnnnnnnnnnnnnnnnnnnnnnnnnnnnnnnnnnnnnnnnnnnnnnnnnnnnnnnnnnnnnnnnnnnnnnnnnnnnnnnnnnnnnnnnnnnnnnnnnnnnnnnnnnnnnnnnnnnnnnnnnnnnnnnnnnnnnnnnnnnnnnnnnnnnnnnnnnnnnnnnnnnnnnnnnnnnnnnnnnnnnnnnnnnnnnnnnnnnnnnnnnnnnnnnnnnnnnnnnnnnnnnnnnnnnnnnnnnnnnnnnnnnnnnnnnnnnnnnnnnnnnnnnnnnnnnnnnnnnnnnnnnnnnnnnnnnnnnnnnnnnnnnnnnnnnnnnnnnnnnnnnnnnnnnnnnnnnnnnnnnnnnnnnnnnnnnnnnnnnnnnnnnnnnnnnnnnnnnnnnnnnnnnnnnnnnnnnnnnnnnnnnnnnnnnnnnnnnnnnnnnnnnnnnnnnnnnnnnnnnnnnnnnnnnnnnnnnnnnnnnnnnnnnnnnnnnnnnnnnnnnnnnnnnnnnnnnnnnnnnnnnnnnnnnnnnnnnnnnnnnnnnnnnnnnnnnnnnnnnnnnnnnnnnnnnnnnnnnnnnnnnnnnnnnnnnnnnnnnnnnnnnnnnnnnnnnnnnnnnnnnnnnnnnnnnnnnnnnnnnnnnnnnnnnnnnnnnnnnnnnnnnnnnnnnnnnnnnnnnnnnnnnnnnnnnnnnnnnnnnnnnnnnnnnnnnnnnnnnnnnnnnnnnnnnnnnnnnnnnnnnnnnnnnnnnnnnnnnnnnnnnnnnnnnnnnnnnnnnnnnnnnnnnnnnnnnnnnnnnnnnnnnnnnnnnnnnnnnnnnnnnnnnnnnnnnnnnnnnnnnnnnnnnnnnnnnnnnnnnnnnnnnnnnnnnnnnnnnnnnnnnnnnnnnnnnnnnnnnnnnnnnnnnnnnnnnnnnnnnnnnnnnnnnnnnnnnnnnnnnnnnnnnnnnnnnnnnnnnnnnnnnnnnnnnnnnnnnnnnnnnnnnnnnnnnnnnnnnnnnnnnnnnnnnnnnnnnnnnnnnnnnnnnnnnnnnnnnnnnnnnnnnnnnnnnnnnnnnnnnnnnnnnnnnnnnnnnnnnnnnnnnnnnnnnnnnnnnnnnnnnnnnnnnnnnnnnnnnnnnnnnnnnnnnnnnnnnnnnnnnnnnnnnnnnnnnnnnnnnnnnnnnnnnnnnnnnnnnnnnnnnnnnnnnnnnnnnnnnnnnnnnnnnnnnnnnnnnnnnnnnnnnnnnnnnnnnnnnnnnnnnnnnnnnnnnnnnnnnnnnnnnnnnnnnnnnnnnnnnnnnnnnnnnnnnnnnnnnnnnnnnnnnnnnnnnnnnnnnnnnnnnnnnnnnnnnnnnnnnnnnnnnnnnnnnnnnnnnnnnnnnnnnnnnnnnnnnnnnnnnnnnnnnnnnnnnnnnnnnnnnnnnnnnnnnnnnnnnnnnnnnnnnnnnnnnnnnnnnnnnnnnnnnnnnnnnnnnnnnnnnnnnnnnnnnnnnnnnnnnnnnnnnnnnnnnnnnnnnnnnnnnnnnnnnnnnnnnnnnnnnnnnnnnnnnnnnnnnnnnnnnnnnnnnnnnnnnnnnnnnnnnnnnnnnnnnnnnnnnnnnnnnnnnnnnnnnnnnnnnnnnnnnnnnnnnnnnnnnnnnnnnnnnnnnnnnnnnnnnnnnnnnnnnnnnnnnnnnnnnnnnnnnnnnnnnnnnnnnnnnnnnnnnnnnnnnnnnnnnnnnnnnnnnnnnnnnnnnnnnnnnnnnnnnnnnnnnnnnnnnnnnnnnnnnnnnnnnnnnnnnnnnnnnnnnnnnnnnnnnnnnnnnnnnnnnnnnnnnnnnnnnnnnnnnnnnnnnnnnnnnnnnnnnnnnnnnnnnnnnnnnnnnnnnnnnnnnnnnnnnnnnnnnnnnnnnnnnnnnnnnnnnnnnnnnnnnnnnnnnnnnnnnnnnnnnnnnnnnnnnnnnnnnnnnnnnnnnnnnnnnnnnnnnnnnnnnnnnnnnnnnnnnnnnnnnnnnnnnnnnnnnnnnnnnnnnnnnnnnnnnnnnnnnnnnnnnnnnnnnnnnnnnnnnnnnnnnnnnnnnnnnnnnnnnnnnnnnnnnnnnnnnnnnnnnnnnnnnnnnnnnnnnnnnnnnnnnnnnnnnnnnnnnnnnnnnnnnnnnnnnnnnnnnnnnnnnnnnnnnnnnnnnnnnnnnnnnnnnnnnnnnnnnnnnnnnnnnnnnnnnnnnnnnnnnnnnnnnnnnnnnnnnnnnnnnnnnnnnnnnnnnnnnnnnnnnnnnnnnnnnnnnnnnnnnnnnnnnnnnnnnnnnnnnnnnnnnnnnnnnnnnnnnnnnnnnnnnnnnnnnnnnnnnnnnnnnnnnnnnnnnnnnnnnnnnnnnnnnnnnnnnnnnnnnnnnnnnnnnnnnnnnnnnnnnnnnnnnnnnnnnnnnnnnnnnnnnnnnnnnnnnnnnnnnnnnnnnnnnnnnnnnnnnnnnnnnnnnnnnnnnnnnnnnnnnnnnnnnnnnnnnnnnnnnnnnnnnnnnnnnnnnnnnnnnnnnnnnnnnnnnnnnnnnnnnnnnnnnnnnnnnnnnnnnnnnnnnnnnnnnnnnnnnnnnnnnnnnnnnnnnnnnnnnnnnnnnnnnnnnnnnnnnnnnnnnnnnnnnnnnnnnnnnnnnnnnnnnnnnnnnnnnnnnnnnnnnnnnnnnnnnnnnnnnnnnnnnnnnnnnnnnnnnnnnnnnnnnnnnnnnnnnnnnnnnnnnnnnnnnnnnnnnnnnnnnnnnnnnnnnnnnnnnnnnnnnnnnnnnnnnnnnnnnnnnnnnnnnnnnnnnnnnnnnnnnnnnnnnnnnnnnnnnnnnnnnnnnnnnnnnnnnnnnnnnnnnnnnnnnnnnnnnnnnnnnnnnnnnnnnnnnnnnnnnnnnnnnnnnnnnnnnnnnnnnnnnnnnnnnnnnnnnnnnnnnnnnnnnnnnnnnnnnnnnnnnnnnnnnnnnnnnnnnnnnnnnnnnnnnnnnnnnnnnnnnnnnnnnnnnnnnnnnnnnnnnnnnnnnnnnnnnnnnnnnnnnnnnnnnnnnnnnnnnnnnnnnnnnnnnnnnnnnnnnnnnnnnnnnnnnnnnnnnnnnnnnnnnnnnnnnnnnnnnnnnnnnnnnnnnnnnnnnnnnnnnnnnnnnnnnnnnnnnnnnnnnnnnnnnnnnnnnnnnnnnnnnnnnnnnnnnnnnnnnnnnnnnnnnnnnnnnnnnnnnnnnnnnnnnnnnnnnnnnnnnnnnnnnnnnnnnnnnnnnnnnnnnnnnnnnnnnnnnnnnnnnnnnnnnnnnnnnnnnnnnnnnnnnnnnnnnnnnnnnnnnnnnnnnnnnnnnnnnnnnnnnnnnnnnnnnnnnnnnnnnnnnnnnnnnnnnnnnnnnnnnnnnnnnnnnnnnnnnnnnnnnnnnnnnnnnnnnnnnnnnnnnnnnnnnnnnnnnnnnnnnnnnnnnnnnnnnnnnnnnnnnnnnnnnnnnnnnnnnnnnnnnnnnnnnnnnnnnnnnnnnnnnnnnnnnnnnnnnnnnnnnnnnnnnnnnnnnnnnnnnnnnnnnnnnnnnnnnnnnnnnnnnnnnnnnnnnnnnnnnnnnnnnnnnnnnnnnnnnnnnnnnnnnnnnnnnnnnnnnnnnnnnnnnnnnnnnnnnnnnnnnnnnnnnnnnnnnnnnnnnnnnnnnnnnnnnnnnnnnnnnnnnnnnnnnnnnnnnnnnnnnnnnnnnnnnnnnnnnnnnnnnnnnnnnnnnnnnnnnnnnnnnnnnnnnnnnnnnnnnnnnnnnnnnnnnnnnnnnnnnnnnnnnnnnnnnnnnnnnnnnnnnnnnnnnnnnnnnnnnnnnnnnnnnnnnnnnnnnnnnnnnnnnnnnnnnnnnnnnnnnnnnnnnnnnnnnnnnnnnnnnnnnnnnnnnnnnnnnnnnnnnnnnnnnnnnnnnnnnnnnnnnnnnnnnnnnnnnnnnnnnnnnnnnnnnnnnnnnnnnnnnnnnnnnnnnnnnnnnnnnnnnnnnnnnnnnnnnnnnnnnnnnnnnnnnnnnnnnnnnnnnnnnnnnnnnnnnnnnnnnnnnnnnnnnnnnnnnnnnnnnnnnnnnnnnnnnnnnnnnnnnnnnnnnnnnnnnnnnnnnnnnnnnnnnnnnnnnnnnnnnnnnnnnnnnnnnnnnnnnnnnnnnnnnnnnnnnnnnnnnnnnnnnnnnnnnnnnnnnnnnnnnnnnnnnnnnnnnnnnnnnnnnnnnnnnnnnnnnnnnnnnnnnnnnnnnnnnnnnnnnnnnnnnnnnnnnnnnnnnnnnnnnnnnnnnnnnnnnnnnnnnnnnnnnnnnnnnnnnnnnnnnnnnnnnnnnnnnnnnnnnnnnnnnnnnnnnnnnnnnnnnnnnnnnnnnnnnnnnnnnnnnnnnnnnnnnnnnnnnnnnnnnnnnnnnnnnnnnnnnnnnnnnnnnnnnnnnnnnnnnnnnnnnnnnnnnnnnnnnnnnnnnnnnnnnnnnnnnnnnnnnnnnnnnnnnnnnnnnnnnnnnnnnnnnnnnnnnnnnnnnnnnnnnnnnnnnnnnnnnnnnnnnnnnnnnnnnnnnnnnnnnnnnnnnnnnnnnnnnnnnnnnnnnnnnnnnnnnnnnnnnnnnnnnnnnnnnnnnnnnnnnnnnnnnnnnnnnnnnnnnnnnnnnnnnnnnnnnnnnnnnnnnnnnnnnnnnnnnnnnnnnnnnnnnnnnnnnnnnnnnnnnnnnnnnnnnnnnnnnnnnnnnnnnnnnnnnnnnnnnnnnnnnnnnnnnnnnnnnnnnnnnnnnnnnnnnnnnnnnnnnnnnnnnnnnnnnnnnnnnnnnnnnnnnnnnnnnnnnnnnnnnnnnnnnnnnnnnnnnnnnnnnnnnnnnnnnnnnnnnnnnnnnnnnnnnnnnnnnnnnnnnnnnnnnnnnnnnnnnnnnnnnnnnnnnnnnnnnnnnnnnnnnnnnnnnnnnnnnnnnnnnnnnnnnnnnnnnnnnnnnnnnnnnnnnnnnnnnnnnnnnnnnnnnnnnnnnnnnnnnnnnnnnnnnnnnnnnnnnnnnnnnnnnnnnnnnnnnnnnnnnnnnnnnnnnnnnnnnnnnnnnnnnnnnnnnnnnnnnnnnnnnnnnnnnnnnnnnnnnnnnnnnnnnnnnnnnnnnnnnnnnnnnnnnnnnnnnnnnnnnnnnnnnnnnnnnnnnnnnnnnnnnnnnnnnnnnnnnnnnnnnnnnnnnnnnnnnnnnnnnnnnnnnnnnnnnnnnnnnnnnnnnnnnnnnnnnnnnnnnnnnnnnnnnnnnnnnnnnnnnnnnnnnnnnnnnnnnnnnnnnnnnnnnnnnnnnnnnnnnnnnnnnnnnnnnnnnnnnnnnnnnnnnnnnnnnnnnnnnnnnnnnnnnnnnnnnnnnnnnnnnnnnnnnnnnnnnnnnnnnnnnnnnnnnnnnnnnnnnnnnnnnnnnnnnnnnnnnnnnnnnnnnnnnnnnnnnnnnnnnnnnnnnnnnnnnnnnnnnnnnnnnnnnnnnnnnnnnnnnnnnnnnnnnnnnnnnnnnnnnnnnnnnnnnnnnnnnnnnnnnnnnnnnnnnnnnnnnnnnnnnnnnnnnnnnnnnnnnnnnnnnnnnnnnnnnnnnnnnnnnnnnnnnnnnnnnnnnnnnnnnnnnnnnnnnnnnnnnnnnnnnnnnnnnnnnnnnnnnnnnnnnnnnnnnnnnnnnnnnnnnnnnnnnnnnnnnnnnnnnnnnnnnnnnnnnnnnnnnnnnnnnnnnnnnnnnnnnnnnnnnnnnnnnnnnnnnnnnnnnnnnnnnnnnnnnnnnnnnnnnnnnnnnnnnnnnnnnnnnnnnnnnnnnnnnnnnnnnnnnnnnnnnnnnnnnnnnnnnnnnnnnnnnnnnnnnnnnnnnnnnnnnnnnnnnnnnnnnnnnnnnnnnnnnnnnnnnnnnnnnnnnnnnnnnnnnnnnnnnnnnnnnnnnnnnnnnnnnnnnnnnnnnnnnnnnnnnnnnnnnnnnnnnnnnnnnnnnnnnnnnnnnnnnnnnnnnnnnnnnnnnnnnnnnnnnnnnnnnnnnnnnnnnnnnnnnnnnnnnnnnnnnnnnnnnnnnnnnnnnnnnnnnnnnnnnnnnnnnnnnnnnnnnnnnnnnnnnnnnnnnnnnnnnnnnnnnnnnnnnnnnnnnnnnnnnnnnnnnnnnnnnnnnnnnnnnnnnnnnnnnnnnnnnnnnnnnnnnnnnnnnnnnnnnnnnnnnnnnnnnnnnnnnnnnnnnnnnnnnnnnnnnnnnnnnnnnnnnnnnnnnnnnnnnnnnnnnnnnnnnnnnnnnnnnnnnnnnnnnnnnnnnnnnnnnnnnnnnnnnnnnnnnnnnnnnnnnnnnnnnnnnnnnnnnnnnnnnnnnnnnnnnnnnnnnnnnnnnnnnnnnnnnnnnnnnnnnnnnnnnnnnnnnnnnnnnnnnnnnnnnnnnnnnnnnnnnnnnnnnnnnnnnnnnnnnnnnnnnnnnnnnnnnnnnnnnnnnnnnnnnnnnnnnnnnnnnnnnnnnnnnnnnnnnnnnnnnnnnnnnnnnnnnnnnnnnnnnnnnnnnnnnnnnnnnnnnnnnnnnnnnnnnnnnnnnnnnnnnnnnnnnnnnnnnnnnnnnnnnnnnnnnnnnnnnnnnnnnnnnnnnnnnnnnnnnnnnnnnnnnnnnnnnnnnnnnnnnnnnnnnnnnnnnnnnnnnnnnnnnnnnnnnnnnnnnnnnnnnnnnnnnnnnnnnnnnnnnnnnnnnnnnnnnnnnnnnnnnnnnnnnnnnnnnnnnnnnnnnnnnnnnnnnnnnnnnnnnnnnnnnnnnnnnnnnnnnnnnnnnnnnnnnnnnnnnnnnnnnnnnnnnnnnnnnnnnnnnnnnnnnnnnnnnnnnnnnnnnnnnnnnnnnnnnnnnnnnnnnnnnnnnnnnnnnnnnnnnnnnnnnnnnnnnnnnnnnnnnnnnnnnnnnnnnnnnnnnnnnnnnnnnnnnnnnnnnnnnnnnnnnnnnnnnnnnnnnnnnnnnnnnnnnnnnnnnnnnnnnnnnnnnnnnnnnnnnnnnnnnnnnnnnnnnnnnnnnnnnnnnnnnnnnnnnnnnnnnnnnnnnnnnnnnnnnnnnnnnnnnnnnnnnnnnnnnnnnnnnnnnnnnnnnnnnnnnnnnnnnnnnnnnnnnnnnnnnnnnnnnnnnnnnnnnnnnnnnnnnnnnnnnnnnnnnnnnnnnnnnnnnnnnnnnnnnnnnnnnnnnnnnnnnnnnnnnnnnnnnnnnnnnnnnnnnnnnnnnnnnnnnnnnnnnnnnnnnnnnnnnnnnnnnnnnnnnnnnnnnnnnnnnnnnnnnnnnnnnnnnnnnnnnnnnnnnnnnnnnnnnnnnnnnnnnnnnnnnnnnnnnnnnnnnnnnnnnnnnnnnnnnnnnnnnnnnnnnnnnnnnnnnnnnnnnnnnnnnnnnnnnnnnnnnnnnnnnnnnnnnnnnnnnnnnnnnnnnnnnnnnnnnnnnnnnnnnnnnnnnnnnnnnnnnnnnnnnnnnnnnnnnnnnnnnnnnnnnnnnnnnnnnnnnnnnnnnnnnnnnnnnnnnnnnnnnnnnnnnnnnnnnnnnnnnnnnnnnnnnnnnnnnnnnnnnnnnnnnnnnnnnnnnnnnnnnnnnnnnnnnnnnnnnnnnnnnnnnnnnnnnnnnnnnnnnnnnnnnnnnnnnnnnnnnnnnnnnnnnnnnnnnnnnnnnnnnnnnnnnnnnnnnnnnnnnnnnnnnnnnnnnnnnnnnnnnnnnnnnnnnnnnnnnnnnnnnnnnnnnnnnnnnnnnnnnnnnnnnnnnnnnnnnnnnnnnnnnnnnnnnnnnnnnnnnnnnnnnnnnnnnnnnnnnnnnnnnnnnnnnnnnnnnnnnnnnnnnnnnnnnnnnnnnnnnnnnnnnnnnnnnnnnnnnnnnnnnnnnnnnnnnnnnnnnnnnnnnnnnnnnnnnnnnnnnnnnnnnnnnnnnnnnnnnnnnnnnnnnnnnnnnnnnnnnnnnnnnnnnnnnnnnnnnnnnnnnnnnnnnnnnnnnnnnnnnnnnnnnnnnnnnnnnnnnnnnnnnnnnnnnnnnnnnnnnnnnnnnnnnnnnnnnnnnnnnnnnnnnnnnnnnnnnnnnnnnnnnnnnnnnnnnnnnnnnnnnnnnnnnnnnnnnnnnnnnnnnnnnnnnnnnnnnnnnnnnnnnnnnnnnnnnnnnnnnnnnnnnnnnnnnnnnnnnnnnnnnnnnnnnnnnnnnnnnnnnnnnnnnnnnnnnnnnnnnnnnnnnnnnnnnnnnnnnnnnnnnnnnnnnnnnnnnnnnnnnnnnnnnnnnnnnnnnnnnnnnnnnnnnnnnnnnnnnnnnnnnnnnnnnnnnnnnnnnnnnnnnnnnnnnnnnnnnnnnnnnnnnnnnnnnnnnnnnnnnnnnnnnnnnnnnnnnnnnnnnnnnnnnnnnnnnnnnnnnnnnnnnnnnnnnnnnnnnnnnnnnnnnnnnnnnnnnnnnnnnnnnnnnnnnnnnnnnnnnnnnnnnnnnnnnnnnnnnnnnnnnnnnnnnnnnnnnnnnnnnnnnnnnnnnnnnnnnnnnnnnnnnnnnnnnnnnnnnnnnnnnnnnnnnnnnnnnnnnnnnnnnnnnnnnnnnnnnnnnnnnnnnnnnnnnnnnnnnnnnnnnnnnnnnnnnnnnnnnnnnnnnnnnnnnnnnnnnnnnnnnnnnnnnnnnnnnnnnnnnnnnnnnnnnnnnnnnnnnnnnnnnnnnnnnnnnnnnnnnnnnnnnnnnnnnnnnnnnnnnnnnnnnnnnnnnnnnnnnnnnnnnnnnnnnnnnnnnnnnnnnnnnnnnnnnnnnnnnnnnnnnnnnnnnnnnnnnnnnnnnnnnnnnnnnnnnnnnnnnnnnnnnnnnnnnnnnnnnnnnnnnnnnnnnnnnnnnnnnnnnnnnnnnnnnnnnnnnnnnnnnnnnnnnnnnnnnnnnnnnnnnnnnnnnnnnnnnnnnnnnnnnnnnnnnnnnnnnnnnnnnnnnnnnnnnnnnnnnnnnnnnnnnnnnnnnnnnnnnnnnnnnnnnnnnnnnnnnnnnnnnnnnnnnnnnnnnnnnnnnnnnnnnnnnnnnnnnnnnnnnnnnnnnnnnnnnnnnnnnnnnnnnnnnnnnnnnnnnnnnnnnnnnnnnnnnnnnnnnnnnnnnnnnnnnnnnnnnnnnnnnnnnnnnnnnnnnnnnnnnnnnnnnnnnnnnnnnnnnnnnnnnnnnnnnnnnnnnnnnnnnnnnnnnnnnnnnnnnnnnnnnnnnnnnnnnnnnnnnnnnnnnnnnnnnnnnnnnnnnnnnnnnnnnnnnnnnnnnnnnnnnnnnnnnnnnnnnnnnnnnnnnnnnnnnnnnnnnnnnnnnnnnnnnnnnnnnnnnnnnnnnnnnnnnnnnnnnnnnnnnnnnnnnnnnnnnnnnnnnnnnnnnnnnnnnnnnnnnnnnnnnnnnnnnnnnnnnnnnnnnnnnnnnnnnnnnnnnnnnnnnnnnnnnnnnnnnnnnnnnnnnnnnnnnnnnnnnnnnnnnnnnnnnnnnnnnnnnnnnnnnnnnnnnnnnnnnnnnnnnnnnnnnnnnnnnnnnnnnnnnnnnnnnnnnnnnnnnnnnnnnnnnnnnnnnnnnnnnnnnnnnnnnnnnnnnnnnnnnnnnnnnnnnnnnnnnnnnnnnnnnnnnnnnnnnnnnnnnnnnnnnnnnnnnnnnnnnnnnnnnnnnnnnnnnnnnnnnnnnnnnnnnnnnnnnnnnnnnnnnnnnnnnnnnnnnnnnnnnnnnnnnnnnnnnnnnnnnnnnnnnnnnnnnnnnnnnnnnnnnnnnnnnnnnnnnnnnnnnnnnnnnnnnnnnnnnnnnnnnnnnnnnnnnnnnnnnnnnnnnnnnnnnnnnnnnnnnnnnnnnnnnnnnnnnnnnnnnnnnnnnnnnnnnnnnnnnnnnnnnnnnnnnnnnnnnnnnnnnnnnnnnnnnnnnnnnnnnnnnnnnnnnnnnnnnnnnnnnnnnnnnnnnnnnnnnnnnnnnnnnnnnnnnnnnnnnnnnnnnnnnnnnnnnnnnnnnnnnnnnnnnnnnnnnnnnnnnnnnnnnnnnnnnnnnnnnnnnnnnnnnnnnnnnnnnnnnnnnnnnnnnnnnnnnnnnnnnnnnnnnnnnnnnnnnnnnnnnnnnnnnnnnnnnnnnnnnnnnnnnnnnnnnnnnnnnnnnnnnnnnnnnnnnnnnnnnnnnnnnnnnnnnnnnnnnnnnnnnnnnnnnnnnnnnnnnnnnnnnnnnnnnnnnnnnnnnnnnnnnnnnnnnnnnnnnnnnnnnnnnnnnnnnnnnnnnnnnnnnnnnnnnnnnnnnnnnnnnnnnnnnnnnnnnnnnnnnnnnnnnnnnnnnnnnnnnnnnnnnnnnnnnnnnnnnnnnnnnnnnnnnnnnnnnnnnnnnnnnnnnnnnnnnnnnnnnnnnnnnnnnnnnnnnnnnnnnnnnnnnnnnnnnnnnnnnnnnnnnnnnnnnnnnnnnnnnnnnnnnnnnnnnnnnnnnnnnnnnnnnnnnnnnnnnnnnnnnnnnnnnnnnnnnnnnnnnnnnnnnnnnnnnnnnnnnnnnnnnnnnnnnnnnnnnnnnnnnnnnnnnnnnnnnnnnnnnnnnnnnnnnnnnnnnnnnnnnnnnnnnnnnnnnnnnnnnnnnnnnnnnnnnnnnnnnnnnnnnnnnnnnnnnnnnnnnnnnnnnnnnnnnnnnnnnnnnnnnnnnnnnnnnnnnnnnnnnnnnnnnnnnnnnnnnnnnnnnnnnnnnnnnnnnnnnnnnnnnnnnnnnnnnnnnnnnnnnnnnnnnnnnnnnnnnnnnnnnnnnnnnnnnnnnnnnnnnnnnnnnnnnnnnnnnnnnnnnnnnnnnnnnnnnnnnnnnnnnnnnnnnnnnnnnnnnnnnnnnnnnnnnnnnnnnnnnnnnnnnnnnnnnnnnnnnnnnnnnnnnnnnnnnnnnnnnnnnnnnnnnnnnnnnnnnnnnnnnnnnnnnnnnnnnnnnnnnnnnnnnnnnnnnnnnnnnnnnnnnnnnnnnnnnnnnnnnnnnnnnnnnnnnnnnnnnnnnnnnnnnnnnnnnnnnnnnnnnnnnnnnnnnnnnnnnnnnnnnnnnnnnnnnnnnnnnnnnnnnnnnnnnnnnnnnnnnnnnnnnnnnnnnnnnnnnnnnnnnnnnnnnnnnnnnnnnnnnnnnnnnnnnnnnnnnnnnnnnnnnnnnnnnnnnnnnnnnnnnnnnnnnnnnnnnnnnnnnnnnnnnnnnnnnnnnnnnnnnnnnnnnnnnnnnnnnnnnnnnnnnnnnnnnnnnnnnnnnnnnnnnnnnnnnnnnnnnnnnnnnnnnnnnnnnnnnnnnnnnnnnnnnnnnnnnnnnnnnnnnnnnnnnnnnnnnnnnnnnnnnnnnnnnnnnnnnnnnnnnnnnnnnnnnnnnnnnnnnnnnnnnnnnnnnnnnnnnnnnnnnnnnnnnnnnnnnnnnnnnnnnnnnnnnnnnnnnnnnnnnnnnnnnnnnnnnnnnnnnnnnnnnnnnnnnnnnnnnnnnnnnnnnnnnnnnnnnnnnnnnnnnnnnnnnnnnnnnnnnnnnnnnnnnnnnnnnnnnnnnnnnnnnnnnnnnnnnnnnnnnnnnnnnnnnnnnnnnnnnnnnnnnnnnnnnnnnnnnnnnnnnnnnnnnnnnnnnnnnnnnnnnnnnnnnnnnnnnnnnnnnnnnnnnnnnnnnnnnnnnnnnnnnnnnnnnnnnnnnnnnnnnnnnnnnnnnnnnnnnnnnnnnnnnnnnnnnnnnnnnnnnnnnnnnnnnnnnnnnnnnnnnnnnnnnnnnnnnnnnnnnnnnnnnnnnnnnnnnnnnnnnnnnnnnnnnnnnnnnnnnnnnnnnnnnnnnnnnnnnnnnnnnnnnnnnnnnnnnnnnnnnnnnnnnnnnnnnnnnnnnnnnnnnnnnnnnnnnnnnnnnnnnnnnnnnnnnnnnnnnnnnnnnnnnnnnnnnnnnnnnnnnnnnnnnnnnnnnnnnnnnnnnnnnnnnnnnnnnnnnnnnnnnnnnnnnnnnnnnnnnnnnnnnnnnnnnnnnnnnnnnnnnnnnnnnnnnnnnnnnnnnnnnnnnnnnnnnnnnnnnnnnnnnnnnnnnnnnnnnnnnnnnnnnnnnnnnnnnnnnnnnnnnnnnnnnnnnnnnnnnnnnnnnnnnnnnnnnnnnnnnnnnnnnnnnnnnnnnnnnnnnnnnnnnnnnnnnnnnnnnnnnnnnnnnnnnnnnnnnnnnnnnnnnnnnnnnnnnnnnnnnnnnnnnnnnnnnnnnnnnnnnnnnnnnnnnnnnnnnnnnnnnnnnnnnnnnnnnnnnnnnnnnnnnnnnnnnnnnnnnnnnnnnnnnnnnnnnnnnnnnnnnnnnnnnnnnnnnnnnnnnnnnnnnnnnnnnnnnnnnnnnnnnnnnnnnnnnnnnnnnnnnnnnnnnnnnnnnnnnnnnnnnnnnnnnnnnnnnnnnnnnnnnnnnnnnnnnnnnnnnnnnnnnnnnnnnnnnnnnnnnnnnnnnnnnnnnnnnnnnnnnnnnnnnnnnnnnnnnnnnnnnnnnnnnnnnnnnnnnnnnnnnnnnnnnnnnnnnnnnnnnnnnnnnnnnnnnnnnnnnnnnnnnnnnnnnnnnnnnnnnnnnnnnnnnnnnnnnnnnnnnnnnnnnnnnnnnnnnnnnnnnnnnnnnnnnnnnnnnnnnnnnnnnnnnnnnnnnnnnnnnnnnnnnnnnnnnnnnnnnnnnnnnnnnnnnnnnnnnnnnnnnnnnnnnnnnnnnnnnnnnnnnnnnnnnnnnnnnnnnnnnnnnnnnnnnnnnnnnnnnnnnnnnnnnnnnnnnnnnnnnnnnnnnnnnnnnnnnnnnnnnnnnnnnnnnnnnnnnnnnnnnnnnnnnnnnnnnnnnnnnnnnnnnnnnnnnnnnnnnnnnnnnnnnnnnnnnnnnnnnnnnnnnnnnnnnnnnnnnnnnnnnnnnnnnnnnnnnnnnnnnnnnnnnnnnnnnnnnnnnnnnnnnnnnnnnnnnnnnnnnnnnnnnnnnnnnnnnnnnnnnnnnnnnnnnnnnnnnnnnnnnnnnnnnnnnnnnnnnnnnnnnnnnnnnnnnnnnnnnnnnnnnnnnnnnnnnnnnnnnnnnnnnnnnnnnnnnnnnnnnnnnnnnnnnnnnnnnnnnnnnnnnnnnnnnnnnnnnnnnnnnnnnnnnnnnnnnnnnnnnnnnnnnnnnnnnnnnnnnnnnnnnnnnnnnnnnnnnnnnnnnnnnnnnnnnnnnnnnnnnnnnnnnnnnnnnnnnnnnnnnnnnnnnnnnnnnnnnnnnnnnnnnnnnnnnnnnnnnnnnnnnnnnnnnnnnnnnnnnnnnnnnnnnnnnnnnnnnnnnnnnnnnnnnnnnnnnnnnnnnnnnnnnnnnnnnnnnnnnnnnnnnnnnnnnnnnnnnnnnnnnnnnnnnnnnnnnnnnnnnnnnnnnnnnnnnnnnnnnnnnnnnnnnnnnnnnnnnnnnnnnnnnnnnnnnnnnnnnnnnnnnnnnnnnnnnnnnnnnnnnnnnnnnnnnnnnnnnnnnnnnnnnnnnnnnnnnnnnnnnnnnnnnnnnnnnnnnnnnnnnnnnnnnnnnnnnnnnnnnnnnnnnnnnnnnnnnnnnnnnnnnnnnnnnnnnnnnnnnnnnnnnnnnnnnnnnnnnnnnnnnnnnnnnnnnnnnnnnnnnnnnnnnnnnnnnnnnnnnnnnnnnnnnnnnnnnnnnnnnnnnnnnnnnnnnnnnnnnnnnnnnnnnnnnnnnnnnnnnnnnnnnnnnnnnnnnnnnnnnnnnnnnnnnnnnnnnnnnnnnnnnnnnnnnnnnnnnnnnnnnnnnnnnnnnnnnnnnnnnnnnnnnnnnnnnnnnnnnnnnnnnnnnnnnnnnnnnnnnnnnnnnnnnnnnnnnnnnnnnnnnnnnnnnnnnnnnnnnnnnnnnnnnnnnnnnnnnnnnnnnnnnnnnnnnnnnnnnnnnnnnnnnnnnnnnnnnnnnnnnnnnnnnnnnnnnnnnnnnnnnnnnnnnnnnnnnnnnnnnnnnnnnnnnnnnnnnnnnnnnnnnnnnnnnnnnnnnnnnnnnnnnnnnnnnnnnnnnnnnnnnnnnnnnnnnnnnnnnnnnnnnnnnnnnnnnnnnnnnnnnnnnnnnnnnnnnnnnnnnnnnnnnnnnnnnnnnnnnnnnnnnnnnnnnnnnnnnnnnnnnnnnnnnnnnnnnnnnnnnnnnnnnnnnnnnnnnnnnnnnnnnnnnnnnnnnnnnnnnnnnnnnnnnnnnnnnnnnnnnnnnnnnnnnnnnnnnnnnnnnnnnnnnnnnnnnnnnnnnnnnnnnnnnnnnnnnnnnnnnnnnnnnnnnnnnnnnnnnnnnnnnnnnnnnnnnnnnnnnnnnnnnnnnnnnnnnnnnnnnnnnnnnnnnnnnnnnnnnnnnnnnnnnnnnnnnnnnnnnnnnnnnnnnnnnnnnnnnnnnnnnnnnnnnnnnnnnnnnnnnnnnnnnnnnnnnnnnnnnnnnnnnnnnnnnnnnnnnnnnnnnnnnnnnnnnnnnnnnnnnnnnnnnnnnnnnnnnnnnnnnnnnnnnnnnnnnnnnnnnnnnnnnnnnnnnnnnnnnnnnnnnnnnnnnnnnnnnnnnnnnnnnnnnnnnnnnnnnnnnnnnnnnnnnnnnnnnnnnnnnnnnnnnnnnnnnnnnnnnnnnnnnnnnnnnnnnnnnnnnnnnnnnnnnnnnnnnnnnnnnnnnnnnnnnnnnnnnnnnnnnnnnnnnnnnnnnnnnnnnnnnnnnnnnnnnnnnnnnnnnnnnnnnnnnnnnnnnnnnnnnnnnnnnnnnnnnnnnnnnnnnnnnnnnnnnnnnnnnnnnnnnnnnnnnnnnnnnnnnnnnnnnnnnnnnnnnnnnnnnnnnnnnnnnnnnnnnnnnnnnnnnnnnnnnnnnnnnnnnnnnnnnnnnnnnnnnnnnnnnnnnnnnnnnnnnnnnnnnnnnnnnnnnnnnnnnnnnnnnnnnnnnnnnnnnnnnnnnnnnnnnnnnnnnnnnnnnnnnnnnnnnnnnnnnnnnnnnnnnnnnnnnnnnnnnnnnnnnnnnnnnnnnnnnnnnnnnnnnnnnnnnnnnnnnnnnnnnnnnnnnnnnnnnnnnnnnnnnnnnnnnnnnnnnnnnnnnnnnnnnnnnnnnnnnnnnnnnnnnnnnnnnnnnnnnnnnnnnnnnnnnnnnnnnnnnnnnnnnnnnnnnnnnnnnnnnnnnnnnnnnnnnnnnnnnnnnnnnnnnnnnnnnnnnnnnnnnnnnnnnnnnnnnnnnnnnnnnnnnnnnnnnnnnnnnnnnnnnnnnnnnnnnnnnnnnnnnnnnnnnnnnnnnnnnnnnnnnnnnnnnnnnnnnnnnnnnnnnnnnnnnnnnnnnnnnnnnnnnnnnnnnnnnnnnnnnnnnnnnnnnnnnnnnnnnnnnnnnnnnnnnnnnnnnnnnnnnnnnnnnnnnnnnnnnnnnnnnnnnnnnnnnnnnnnnnnnnnnnnnnnnnnnnnnnnnnnnnnnnnnnnnnnnnnnnnnnnnnnnnnnnnnnnnnnnnnnnnnnnnnnnnnnnnnnnnnnnnnnnnnnnnnnnnnnnnnnnnnnnnnnnnnnnnnnnnnnnnnnnnnnnnnnnnnnnnnnnnnnnnnnnnnnnnnnnnnnnnnnnnnnnnnnnnnnnnnnnnnnnnnnnnnnnnnnnnnnnnnnnnnnnnnnnnnnnnnnnnnnnnnnnnnnnnnnnnnnnnnnnnnnnnnnnnnnnnnnnnnnnnnnnnnnnnnnnnnnnnnnnnnnnnnnnnnnnnnnnnnnnnnnnnnnnnnnnnnnnnnnnnnnnnnnnnnnnnnnnnnnnnnnnnnnnnnnnnnnnnnnnnnnnnnnnnnnnnnnnnnnnnnnnnnnnnnnnnnnnnnnnnnnnnnnnnnnnnnnnnnnnnnnnnnnnnnnnnnnnnnnnnnnnnnnnnnnnnnnnnnnnnnnnnnnnnnnnnnnnnnnnnnnnnnnnnnnnnnnnnnnnnnnnnnnnnnnnnnnnnnnnnnnnnnnnnnnnnnnnnnnnnnnnnnnnnnnnnnnnnnnnnnnnnnnnnnnnnnnnnnnnnnnnnnnnnnnnnnnnnnnnnnnnnnnnnnnnnnnnnnnnnnnnnnnnnnnnnnnnnnnnnnnnnnnnnnnnnnnnnnnnnnnnnnnnnnnnnnnnnnnnnnnnnnnnnnnnnnnnnnnnnnnnnnnnnnnnnnnnnnnnnnnnnnnnnnnnnnnnnnnnnnnnnnnnnnnnnnnnnnnnnnnnnnnnnnnnnnnnnnnnnnnnnnnnnnnnnnnnnnnnnnnnnnnnnnnnnnnnnnnnnnnnnnnnnnnnnnnnnnnnnnnnnnnnnnnnnnnnnnnnnnnnnnnnnnnnnnnnnnnnnnnnnnnnnnnnnnnnnnnnnnnnnnnnnnnnnnnnnnnnnnnnnnnnnnnnnnnnnnnnnnnnnnnnnnnnnnnnnnnnnnnnnnnnnnnnnnnnnnnnnnnnnnnnnnnnnnnnnnnnnnnnnnnnnnnnnnnnnnnnnnnnnnnnnnnnnnnnnnnnnnnnnnnnnnnnnnnnnnnnnnnnnnnnnnnnnnnnnnnnnnnnnnnnnnnnnnnnnnnnnnnnnnnnnnnnnnnnnnnnnnnnnnnnnnnnnnnnnnnnnnnnnnnnnnnnnnnnnnnnnnnnnnnnnnnnnnnnnnnnnnnnnnnnnnnnnnnnnnnnnnnnnnnnnnnnnnnnnnnnnnnnnnnnnnnnnnnnnnnnnnnnnnnnnnnnnnnnnnnnnnnnnnnnnnnnnnnnnnnnnnnnnnnnnnnnnnnnnnnnnnnnnnnnnnnnnnnnnnnnnnnnnnnnnnnnnnnnnnnnnnnnnnnnnnnnnnnnnnnnnnnnnnnnnnnnnnnnnnnnnnnnnnnnnnnnnnnnnnnnnnnnnnnnnnnnnnnnnnnnnnnnnnnnnnnnnnnnnnnnnnnnnnnnnnnnnnnnnnnnnnnnnnnnnnnnnnnnnnnnnnnnnnnnnnnnnnnnnnnnnnnnnnnnnnnnnnnnnnnnnnnnnnnnnnnnnnnnnnnnnnnnnnnnnnnnnnnnnnnnnnnnnnnnnnnnnnnnnnnnnnnnnnnnnnnnnnnnnnnnnnnnnnnnnnnnnnnnnnnnnnnnnnnnnnnnnnnnnnnnnnnnnnnnnnnnnnnnnnnnnnnnnnnnnnnnnnnnnnnnnnnnnnnnnnnnnnnnnnnnnnnnnnnnnnnnnnnnnnnnnnnnnnnnnnnnnnnnnnnnnnnnnnnnnnnnnnnnnnnnnnnnnnnnnnnnnnnnnnnnnnnnnnnnnnnnnnnnnnnnnnnnnnnnnnnnnnnnnnnnnnnnnnnnnnnnnnnnnnnnnnnnnnnnnnnnnnnnnnnnnnnnnnnnnnnnnnnnnnnnnnnnnnnnnnnnnnnnnnnnnnnnnnnnnnnnnnnnnnnnnnnnnnnnnnnnnnnnnnnnnnnnnnnnnnnnnnnnnnnnnnnnnnnnnnnnnnnnnnnnnnnnnnnnnnnnnnnnnnnnnnnnnnnnnnnnnnnnnnnnnnnnnnnnnnnnnnnnnnnnnnnnnnnnnnnnnnnnnnnnnnnnnnnnnnnnnnnnnnnnnnnnnnnnnnnnnnnnnnnnnnnnnnnnnnnnnnnnnnnnnnnnnnnnnnnnnnnnnnnnnnnnnnnnnnnnnnnnnnnnnnnnnnnnnnnnnnnnnnnnnnnnnnnnnnnnnnnnnnnnnnnnnnnnnnnnnnnnnnnnnnnnnnnnnnnnnnnnnnnnnnnnnnnnnnnnnnnnnnnnnnnnnnnnnnnnnnnnnnnnnnnnnnnnnnnnnnnnnnnnnnnnnnnnnnnnnnnnnnnnnnnnnnnnnnnnnnnnnnnnnnnnnnnnnnnnnnnnnnnnnnnnnnnnnnnnnnnnnnnnnnnnnnnnnnnnnnnnnnnnnnnnnnnnnnnnnnnnnnnnnnnnnnnnnnnnnnnnnnnnnnnnnnnnnnnnnnnnnnnnnnnnnnnnnnnnnnnnnnnnnnnnnnnnnnnnnnnnnnnnnnnnnnnnnnnnnnnnnnnnnnnnnnnnnnnnnnnnnnnnnnnnnnnnnnnnnnnnnnnnnnnnnnnnnnnnnnnnnnnnnnnnnnnnnnnnnnnnnnnnnnnnnnnnnnnnnnnnnnnnnnnnnnnnnnnnnnnnnnnnnnnnnnnnnnnnnnnnnnnnnnnnnnnnnnnnnnnnnnnnnnnnnnnnnnnnnnnnnnnnnnnnnnnnnnnnnnnnnnnnnnnnnnnnnnnnnnnnnnnnnnnnnnnnnnnnnnnnnnnnnnnnnnnnnnnnnnnnnnnnnnnnnnnnnnnnnnnnnnnnnnnnnnnnnnnnnnnnnnnnnnnnnnnnnnnnnnnnnnnnnnnnnnnnnnnnnnnnnnnnnnnnnnnnnnnnnnnnnnnnnnnnnnnnnnnnnnnnnnnnnnnnnnnnnnnnnnnnnnnnnnnnnnnnnnnnnnnnnnnnnnnnnnnnnnnnnnnnnnnnnnnnnnnnnnnnnnnnnnnnnnnnnnnnnnnnnnnnnnnnnnnnnnnnnnnnnnnnnnnnnnnnnnnnnnnnnnnnnnnnnnnnnnnnnnnnnnnnnnnnnnnnnnnnnnnnnnnnnnnnnnnnnnnnnnnnnnnnnnnnnnnnnnnnnnnnnnnnnnnnnnnnnnnnnnnnnnnnnnnnnnnnnnnnnnnnnnnnnnnnnnnnnnnnnnnnnnnnnnnnnnnnnnnnnnnnnnnnnnnnnnnnnnnnnnnnnnnnnnnnnnnnnnnnnnnnnnnnnnnnnnnnnnnnnnnnnnnnnnnnnnnnnnnnnnnnnnnnnnnnnnnnnnnnnnnnnnnnnnnnnnnnnnnnnnnnnnnnnnnnnnnnnnnnnnnnnnnnnnnnnnnnnnnnnnnnnnnnnnnnnnnnnnnnnnnnnnnnnnnnnnnnnnnnnnnnnnnnnnnnnnnnnnnnnnnnnnnnnnnnnnnnnnnnnnnnnnnnnnnnnnnnnnnnnnnnnnnnnnnnnnnnnnnnnnnnnnnnnnnnnnnnnnnnnnnnnnnnnnnnnnnnnnnnnnnnnnnnnnnnnnnnnnnnnnnnnnnnnnnnnnnnnnnnnnnnnnnnnnnnnnnnnnnnnnnnnnnnnnnnnnnnnnnnnnnnnnnnnnnnnnnnnnnnnnnnnnnnnnnnnnnnnnnnnnnnnnnnnnnnnnnnnnnnnnnnnnnnnnnnnnnnnnnnnnnnnnnnnnnnnnnnnnnnnnnnnnnnnnnnnnnnnnnnnnnnnnnnnnnnnnnnnnnnnnnnnnnnnnnnnnnnnnnnnnnnnnnnnnnnnnnnnnnnnnnnnnnnnnnnnnnnnnnnnnnnnnnnnnnnnnnnnnnnnnnnnnnnnnnnnnnnnnnnnnnnnnnnnnnnnnnnnnnnnnnnnnnnnnnnnnnnnnnnnnnnnnnnnnnnnnnnnnnnnnnnnnnnnnnnnnnnnnnnnnnnnnnnnnnnnnnnnnnnnnnnnnnnnnnnnnnnnnnnnnnnnnnnnnnnnnnnnnnnnnnnnnnnnnnnnnnnnnnnnnnnnnnnnnnnnnnnnnnnnnnnnnnnnnnnnnnnnnnnnnnnnnnnnnnnnnnnnnnnnnnnnnnnnnnnnnnnnnnnnnnnnnnnnnnnnnnnnnnnnnnnnnnnnnnnnnnnnnnnnnnnnnnnnnnnnnnnnnnnnnnnnnnnnnnnnnnnnnnnnnnnnnnnnnnnnnnnnnnnnnnnnnnnnnnnnnnnnnnnnnnnnnnnnnnnnnnnnnnnnnnnnnnnnnnnnnnnnnnnnnnnnnnnnnnnnnnnnnnnnnnnnnnnnnnnnnnnnnnnnnnnnnnnnnnnnnnnnnnnnnnnnnnnnnnnnnnnnnnnnnnnnnnnnnnnnnnnnnnnnnnnnnnnnnnnnnnnnnnnnnnnnnnnnnnnnnnnnnnnnnnnnnnnnnnnnnnnnnnnnnnnnnnnnnnnnnnnnnnnnnnnnnnnnnnnnnnnnnnnnnnnnnnnnnnnnnnnnnnnnnnnnnnnnnnnnnnnnnnnnnnnnnnnnnnnnnnnnnnnnnnnnnnnnnnnnnnnnnnnnnnnnnnnnnnnnnnnnnnnnnnnnnnnnnnnnnnnnnnnnnnnnnnnnnnnnnnnnnnnnnnnnnnnnnnnnnnnnnnnnnnnnnnnnnnnnnnnnnnnnnnnnnnnnnnnnnnnnnnnnnnnnnnnnnnnnnnnnnnnnnnnnnnnnnnnnnnnnnnnnnnnnnnnnnnnnnnnnnnnnnnnnnnnnnnnnnnnnnnnnnnnnnnnnnnnnnnnnnnnnnnnnnnnnnnnnnnnnnnnnnnnnnnnnnnnnnnnnnnnnnnnnnnnnnnnnnnnnnnnnnnnnnnnnnnnnnnnnnnnnnnnnnnnnnnnnnnnnnnnnnnnnnnnnnnnnnnnnnnnnnnnnnnnnnnnnnnnnnnnnnnnnnnnnnnnnnnnnnnnnnnnnnnnnnnnnnnnnnnnnnnnnnnnnnnnnnnnnnnnnnnnnnnnnnnnnnnnnnnnnnnnnnnnnnnnnnnnnnnnnnnnnnnnnnnnnnnnnnnnnnnnnnnnnnnnnnnnnnnnnnnnnnnnnnnnnnnnnnnnnnnnnnnnnnnnnnnnnnnnnnnnnnnnnnnnnnnnnnnnnnnnnnnnnnnnnnnnnnnnnnnnnnnnnnnnnnnnnnnnnnnnnnnnnnnnnnnnnnnnnnnnnnnnnnnnnnnnnnnnnnnnnnnnnnnnnnnnnnnnnnnnnnnnnnnnnnnnnnnnnnnnnnnnnnnnnnnnnnnnnnnnnnnnnnnnnnnnnnnnnnnnnnnnnnnnnnnnnnnnnnnnnnnnnnnnnnnnnnnnnnnnnnnnnnnnnnnnnnnnnnnnnnnnnnnnnnnnnnnnnnnnnnnnnnnnnnnnnnnnnnnnnnnnnnnnnnnnnnnnnnnnnnnnnnnnnnnnnnnnnnnnnnnnnnnnnnnnnnnnnnnnnnnnnnnnnnnnnnnnnnnnnnnnnnnnnnnnnnnnnnnnnnnnnnnnnnnnnnnnnnnnnnnnnnnnnnnnnnnnnnnnnnnnnnnnnnnnnnnnnnnnnnnnnnnnnnnnnnnnnnnnnnnnnnnnnnnnnnnnnnnnnnnnnnnnnnnnnnnnnnnnnnnnnnnnnnnnnnnnnnnnnnnnnnnnnnnnnnnnnnnnnnnnnnnnnnnnnnnnnnnnnnnnnnnnnnnnnnnnnnnnnnnnnnnnnnnnnnnnnnnnnnnnnnnnnnnnnnnnnnnnnnnnnnnnnnnnnnnnnnnnnnnnnnnnnnnnnnnnnnnnnnnnnnnnnnnnnnnnnnnnnnnnnnnnnnnnnnnnnnnnnnnnnnnnnnnnnnnnnnnnnnnnnnnnnnnnnnnnnnnnnnnnnnnnnnnnnnnnnnnnnnnnnnnnnnnnnnnnnnnnnnnnnnnnnnnnnnnnnnnnnnnnnnnnnnnnnnnnnnnnnnnnnnnnnnnnnnnnnnnnnnnnnnnnnnnnnnnnnnnnnnnnnnnnnnnnnnnnnnnnnnnnnnnnnnnnnnnnnnnnnnnnnnnnnnnnnnnnnnnnnnnnnnnnnnnnnnnnnnnnnnnnnnnnnnnnnnnnnnnnnnnnnnnnnnnnnnnnnnnnnnnnnnnnnnnnnnnnnnnnnnnnnnnnnnnnnnnnnnnnnnnnnnnnnnnnnnnnnnnnnnnnnnnnnnnnnnnnnnnnnnnnnnnnnnnnnnnnnnnnnnnnnnnnnnnnnnnnnnnnnnnnnnnnnnnnnnnnnnnnnnnnnnnnnnnnnnnnnnnnnnnnnnnnnnnnnnnnnnnnnnnnnnnnnnnnnnnnnnnnnnnnnnnnnnnnnnnnnnnnnnnnnnnnnnnnnnnnnnnnnnnnnnnnnnnnnnnnnnnnnnnnnnnnnnnnnnnnnnnnnnnnnnnnnnnnnnnnnnnnnnnnnnnnnnnnnnnnnnnnnnnnnnnnnnnnnnnnnnnnnnnnnnnnnnnnnnnnnnnnnnnnnnnnnnnnnnnnnnnnnnnnnnnnnnnnnnnnnnnnnnnnnnnnnnnnnnnnnnnnnnnnnnnnnnnnnnnnnnnnnnnnnnnnnnnnnnnnnnnnnnnnnnnnnnnnnnnnnnnnnnnnnnnnnnnnnnnnnnnnnnnnnnnnnnnnnnnnnnnnnnnnnnnnnnnnnnnnnnnnnnnnnnnnnnnnnnnnnnnnnnnnnnnnnnnnnnnnnnnnnnnnnnnnnnnnnnnnnnnnnnnnnnnnnnnnnnnnnnnnnnnnnnnnnnnnnnnnnnnnnnnnnnnnnnnnnnnnnnnnnnnnnnnnnnnnnnnnnnnnnnnnnnnnnnnnnnnnnnnnnnnnnnnnnnnnnnnnnnnnnnnnnnnnnnnnnnnnnnnnnnnnnnnnnnnnnnnnnnnnnnnnnnnnnnnnnnnnnnnnnnnnnnnnnnnnnnnnnnnnnnnnnnnnnnnnnnnnnnnnnnnnnnnnnnnnnnnnnnnnnnnnnnnnnnnnnnnnnnnnnnnnnnnnnnnnnnnnnnnnnnnnnnnnnnnnnnnnnnnnnnnnnnnnnnnnnnnnnnnnnnnnnnnnnnnnnnnnnnnnnnnnnnnnnnnnnnnnnnnnnnnnnnnnnnnnnnnnnnnnnnnnnnnnnnnnnnnnnnnnnnnnnnnnnnnnnnnnnnnnnnnnnnnnnnnnnnnnnnnnnnnnnnnnnnnnnnnnnnnnnnnnnnnnnnnnnnnnnnnnnnnnnnnnnnnnnnnnnnnnnnnnnnnnnnnnnnnnnnnnnnnnnnnnnnnnnnnnnnnnnnnnnnnnnnnnnnnnnnnnnnnnnnnnnnnnnnnnnnnnnnnnnnnnnnnnnnnnnnnnnnnnnnnnnnnnnnnnnnnnnnnnnnnnnnnnnnnnnnnnnnnnnnnnnnnnnnnnnnnnnnnnnnnnnnnnnnnnnnnnnnnnnnnnnnnnnnnnnnnnnnnnnnnnnnnnnnnnnnnnnnnnnnnnnnnnnnnnnnnnnnnnnnnnnnnnnnnnnnnnnnnnnnnnnnnnnnnnnnnnnnnnnnnnnnnnnnnnnnnnnnnnnnnnnnnnnnnnnnnnnnnnnnnnnnnnnnnnnnnnnnnnnnnnnnnnnnnnnnnnnnnnnnnnnnnnnnnnnnnnnnnnnnnnnnnnnnnnnnnnnnnnnnnnnnnnnnnnnnnnnnnnnnnnnnnnnnnnnnnnnnnnnnnnnnnnnnnnnnnnnnnnnnnnnnnnnnnnnnnnnnnnnnnnnnnnnnnnnnnnnnnnnnnnnnnnnnnnnnnnnnnnnnnnnnnnnnnnnnnnnnnnnnnnnnnnnnnnnnnnnnnnnnnnnnnnnnnnnnnnnnnnnnnnnnnnnnnnnnnnnnnnnnnnnnnnnnnnnnnnnnnnnnnnnnnnnnnnnnnnnnnnnnnnnnnnnnnnnnnnnnnnnnnnnnnnnnnnnnnnnnnnnnnnnnnnnnnnnnnnnnnnnnnnnnnnnnnnnnnnnnnnnnnnnnnnnnnnnnnnnnnnnnnnnnnnnnnnnnnnnnnnnnnnnnnnnnnnnnnnnnnnnnnnnnnnnnnnnnnnnnnnnnnnnnnnnnnnnnnnnnnnnnnnnnnnnnnnnnnnnnnnnnnnnnnnnnnnnnnnnnnnnnnnnnnnnnnnnnnnnnnnnnnnnnnnnnnnnnnnnnnnnnnnnnnnnnnnnnnnnnnnnnnnnnnnnnnnnnnnnnnnnnnnnnnnnnnnnnnnnnnnnnnnnnnnnnnnnnnnnnnnnnnnnnnnnnnnnnnnnnnnnnnnnnnnnnnnnnnnnnnnnnnnnnnnnnnnnnnnnnnnnnnnnnnnnnnnnnnnnnnnnnnnnnnnnnnnnnnnnnnnnnnnnnnnnnnnnnnnnnnnnnnnnnnnnnnnnnnnnnnnnnnnnnnnnnnnnnnnnnnnnnnnnnnnnnnnnnnnnnnnnnnnnnnnnnnnnnnnnnnnnnnnnnnnnnnnnnnnnnnnnnnnnnnnnnnnnnnnnnnnnnnnnnnnnnnnnnnnnnnnnnnnnnnnnnnnnnnnnnnnnnnnnnnnnnnnnnnnnnnnnnnnnnnnnnnnnnnnnnnnnnnnnnnnnnnnnnnnnnnnnnnnnnnnnnnnnnnnnnnnnnnnnnnnnnnnnnnnnnnnnnnnnnnnnnnnnnnnnnnnnnnnnnnnnnnnnnnnnnnnnnnnnnnnnnnnnnnnnnnnnnnnnnnnnnnnnnnnnnnnnnnnnnnnnnnnnnnnnnnnnnnnnnnnnnnnnnnnnnnnnnnnnnnnnnnnnnnnnnnnnnnnnnnnnnnnnnnnnnnnnnnnnnnnnnnnnnnnnnnnnnnnnnnnnnnnnnnnnnnnnnnnnnnnnnnnnnnnnnnnnnnnnnnnnnnnnnnnnnnnnnnnnnnnnnnnnnnnnnnnnnnnnnnnnnnnnnnnnnnnnnnnnnnnnnnnnnnnnnnnnnnnnnnnnnnnnnnnnnnnnnnnnnnnnnnnnnnnnnnnnnnnnnnnnnnnnnnnnnnnnnnnnnnnnnnnnnnnnnnnnnnnnnnnnnnnnnnnnnnnnnnnnnnnnnnnnnnnnnnnnnnnnnnnnnnnnnnnnnnnnnnnnnnnnnnnnnnnnnnnnnnnnnnnnnnnnnnnnnnnnnnnnnnnnnnnnnnnnnnnnnnnnnnnnnnnnnnnnnnnnnnnnnnnnnnnnnnnnnnnnnnnnnnnnnnnnnnnnnnnnnnnnnnnnnnnnnnnnnnnnnnnnnnnnnnnnnnnnnnnnnnnnnnnnnnnnnnnnnnnnnnnnnnnnnnnnnnnnnnnnnnnnnnnnnnnnnnnnnnnnnnnnnnnnnnnnnnnnnnnnnnnnnnnnnnnnnnnnnnnnnnnnnnnnnnnnnnnnnnnnnnnnnnnnnnnnnnnnnnnnnnnnnnnnnnnnnnnnnnnnnnnnnnnnnnnnnnnnnnnnnnnnnnnnnnnnnnnnnnnnnnnnnnnnnnnnnnnnnnnnnnnnnnnnnnnnnnnnnnnnnnnnnnnnnnnnnnnnnnnnnnnnnnnnnnnnnnnnnnnnnnnnnnnnnnnnnnnnnnnnnnnnnnnnnnnnnnnnnnnnnnnnnnnnnnnnnnnnnnnnnnnnnnnnnnnnnnnnnnnnnnnnnnnnnnnnnnnnnnnnnnnnnnnnnnnnnnnnnnnnnnnnnnnnnnnnnnnnnnnnnnnnnnnnnnnnnnnnnnnnnnnnnnnnnnnnnnnnnnnnnnnnnnnnnnnnnnnnnnnnnnnnnnnnnnnnnnnnnnnnnnnnnnnnnnnnnnnnnnnnnnnnnnnnnnnnnnnnnnnnnnnnnnnnnnnnnnnnnnnnnnnnnnnnnnnnnnnnnnnnnnnnnnnnnnnnnnnnnnnnnnnnnnnnnnnnnnnnnnnnnnnnnnnnnnnnnnnnnnnnnnnnnnnnnnnnnnnnnnnnnnnnnnnnnnnnnnnnnnnnnnnnnnnnnnnnnnnnnnnnnnnnnnnnnnnnnnnnnnnnnnnnnnnnnnnnnnnnnnnnnnnnnnnnnnnnnnnnnnnnnnnnnnnnnnnnnnnnnnnnnnnnnnnnnnnnnnnnnnnnnnnnnnnnnnnnnnnnnnnnnnnnnnnnnnnnnnnnnnnnnnnnnnnnnnnnnnnnnnnnnnnnnnnnnnnnnnnnnnnnnnnnnnnnnnnnnnnnnnnnnnnnnnnnnnnnnnnnnnnnnnnnnnnnnnnnnnnnnnnnnnnnnnnnnnnnnnnnnnnnnnnnnnnnnnnnnnnnnnnnnnnnnnnnnnnnnnnnnnnnnnnnnnnnnnnnnnnnnnnnnnnnnnnnnnnnnnnnnnnnnnnnnnnnnnnnnnnnnnnnnnnnnnnnnnnnnnnnnnnnnnnnnnnnnnnnnnnnnnnnnnnnnnnnnnnnnnnnnnnnnnnnnnnnnnnnnnnnnnnnnnnnnnnnnnnnnnnnnnnnnnnnnnnnnnnnnnnnnnnnnnnnnnnnnnnnnnnnnnnnnnnnnnnnnnnnnnnnnnnnnnnnnnnnnnnnnnnnnnnnnnnnnnnnnnnnnnnnnnnnnnnnnnnnnnnnnnnnnnnnnnnnnnnnnnnnnnnnnnnnnnnnnnnnnnnnnnnnnnnnnnnnnnnnnnnnnnnnnnnnnnnnnnnnnnnnnnnnnnnnnnnnnnnnnnnnnnnnnnnnnnnnnnnnnnnnnnnnnnnnnnnnnnnnnnnnnnnnnnnnnnnnnnnnnnnnnnnnnnnnnnnnnnnnnnnnnnnnnnnnnnnnnnnnnnnnnnnnnnnnnnnnnnnnnnnnnnnnnnnnnnnnnnnnnnnnnnnnnnnnnnnnnnnnnnnnnnnnnnnnnnnnnnnnnnnnnnnnnnnnnnnnnnnnnnnnnnnnnnnnnnnnnnnnnnnnnnnnnnnnnnnnnnnnnnnnnnnnnnnnnnnnnnnnnnnnnnnnnnnnnnnnnnnnnnnnnnnnnnnnnnnnnnnnnnnnnnnnnnnnnnnnnnnnnnnnnnnnnnnnnnnnnnnnnnnnnnnnnnnnnnnnnnnnnnnnnnnnnnnnnnnnnnnnnnnnnnnnnnnnnnnnnnnnnnnnnnnnnnnnnnnnnnnnnnnnnnnnnnnnnnnnnnnnnnnnnnnnnnnnnnnnnnnnnnnnnnnnnnnnnnnnnnnnnnnnnnnnnnnnnnnnnnnnnnnnnnnnnnnnnnnnnnnnnnnnnnnnnnnnnnnnnnnnnnnnnnnnnnnnnnnnnnnnnnnnnnnnnnnnnnnnnnnnnnnnnnnnnnnnnnnnnnnnnnnnnnnnnnnnnnnnnnnnnnnnnnnnnnnnnnnnnnnnnnnnnnnnnnnnnnnnnnnnnnnnnnnnnnnnnnnnnnnnnnnnnnnnnnnnnnnnnnnnnnnnnnnnnnnnnnnnnnnnnnnnnnnnnnnnnnnnnnnnnnnnnnnnnnnnnnnnnnnnnnnnnnnnnnnnnnnnnnnnnnnnnnnnnnnnnnnnnnnnnnnnnnnnnnnnnnnnnnnnnnnnnnnnnnnnnnnnnnnnnnnnnnnnnnnnnnnnnnnnnnnnnnnnnnnnnnnnnnnnnnnnnnnnnnnnnnnnnnnnnnnnnnnnnnnnnnnnnnnnnnnnnnnnnnnnnnnnnnnnnnnnnnnnnnnnnnnnnnnnnnnnnnnnnnnnnnnnnnnnnnnnnnnnnnnnnnnnnnnnnnnnnnnnnnnnnnnnnnnnnnnnnnnnnnnnnnnnnnnnnnnnnnnnnnnnnnnnnnnnnnnnnnnnnnnnnnnnnnnnnnnnnnnnnnnnnnnnnnnnnnnnnnnnnnnnnnnnnnnnnnnnnnnnnnnnnnnnnnnnnnnnnnnnnnnnnnnnnnnnnnnnnnnnnnnnnnnnnnnnnnnnnnnnnnnnnnnnnnnnnnnnnnnnnnnnnnnnnnnnnnnnnnnnnnnnnnnnnnnnnnnnnnnnnnnnnnnnnnnnnnnnnnnnnnnnnnnnnnnnnnnnnnnnnnnnnnnnnnnnnnnnnnnnnnnnnnnnnnnnnnnnnnnnnnnnnnnnnnnnnnnnnnnnnnnnnnnnnnnnnnnnnnnnnnnnnnnnnnnnnnnnnnnnnnnnnnnnnnnnnnnnnnnnnnnnnnnnnnnnnnnnnnnnnnnnnnnnnnnnnnnnnnnnnnnnnnnnnnnnnnnnnnnnnnnnnnnnnnnnnnnnnnnnnnnnnnnnnnnnnnnnnnnnnnnnnnnnnnnnnnnnnnnnnnnnnnnnnnnnnnnnnnnnnnnnnnnnnnnnnnnnnnnnnnnnnnnnnnnnnnnnnnnnnnnnnnnnnnnnnnnnnnnnnnnnnnnnnnnnnnnnnnnnnnnnnnnnnnnnnnnnnnnnnnnnnnnnnnnnnnnnnnnnnnnnnnnnnnnnnnnnnnnnnnnnnnnnnnnnnnnnnnnnnnnnnnnnnnnnnnnnnnnnnnnnnnnnnnnnnnnnnnnnnnnnnnnnnnnnnnnnnnnnnnnnnnnnnnnnnnnnnnnnnnnnnnnnnnnnnnnnnnnnnnnnnnnnnnnnnnnnnnnnnnnnnnnnnnnnnnnnnnnnnnnnnnnnnnnnnnnnnnnnnnnnnnnnnnnnnnnnnnnnnnnnnnnnnnnnnnnnnnnnnnnnnnnnnnnnnnnnnnnnnnnnnnnnnnnnnnnnnnnnnnnnnnnnnnnnnnnnnnnnnnnnnnnnnnnnnnnnnnnnnnnnnnnnnnnnnnnnnnnnnnnnnnnnnnnnnnnnnnnnnnnnnnnnnnnnnnnnnnnnnnnnnnnnnnnnnnnnnnnnnnnnnnnnnnnnnnnnnnnnnnnnnnnnnnnnnnnnnnnnnnnnnnnnnnnnnnnnnnnnnnnnnnnnnnnnnnnnnnnnnnnnnnnnnnnnnnnnnnnnnnnnnnnnnnnnnnnnnnnnnnnnnnnnnnnnnnnnnnnnnnnnnnnnnnnnnnnnnnnnnnnnnnnnnnnnnnnnnnnnnnnnnnnnnnnnnnnnnnnnnnnnnnnnnnnnnnnnnnnnnnnnnnnnnnnnnnnnnnnnnnnnnnnnnnnnnnnnnnnnnnnnnnnnnnnnnnnnnnnnnnnnnnnnnnnnnnnnnnnnnnnnnnnnnnnnnnnnnnnnnnnnnnnnnnnnnnnnnnnnnnnnnnnnnnnnnnnnnnnnnnnnnnnnnnnnnnnnnnnnnnnnnnnnnnnnnnnnnnnnnnnnnnnnnnnnnnnnnnnnnnnnnnnnnnnnnnnnnnnnnnnnnnnnnnnnnnnnnnnnnnnnnnnnnnnnnnnnnnnnnnnnnnnnnnnnnnnnnnnnnnnnnnnnnnnnnnnnnnnnnnnnnnnnnnnnnnnnnnnnnnnnnnnnnnnnnnnnnnnnnnnnnnnnnnnnnnnnnnnnnnnnnnnnnnnnnnnnnnnnnnnnnnnnnnnnnnnnnnnnnnnnnnnnnnnnnnnnnnnnnnnnnnnnnnnnnnnnnnnnnnnnnnnnnnnnnnnnnnnnnnnnnnnnnnnnnnnnnnnnnnnnnnnnnnnnnnnnnnnnnnnnnnnnnnnnnnnnnnnnnnnnnnnnnnnnnnnnnnnnnnnnnnnnnnnnnnnnnnnnnnnnnnnnnnnnnnnnnnnnnnnnnnnnnnnnnnnnnnnnnnnnnnnnnnnnnnnnnnnnnnnnnnnnnnnnnnnnnnnnnnnnnnnnnnnnnnnnnnnnnnnnnnnnnnnnnnnnnnnnnnnnnnnnnnnnnnnnnnnnnnnnnnnnnnnnnnnnnnnnnnnnnnnnnnnnnnnnnnnnnnnnnnnnnnnnnnnnnnnnnnnnnnnnnnnnnnnnnnnnnnnnnnnnnnnnnnnnnnnnnnnnnnnnnnnnnnnnnnnnnnnnnnnnnnnnnnnnnnnnnnnnnnnnnnnnnnnnnnnnnnnnnnnnnnnnnnnnnnnnnnnnnnnnnnnnnnnnnnnnnnnnnnnnnnnnnnnnnnnnnnnnnnnnnnnnnnnnnnnnnnnnnnnnnnnnnnnnnnnnnnnnnnnnnnnnnnnnnnnnnnnnnnnnnnnnnnnnnnnnnnnnnnnnnnnnnnnnnnnnnnnnnnnnnnnnnnnnnnnnnnnnnnnnnnnnnnnnnnnnnnnnnnnnnnnnnnnnnnnnnnnnnnnnnnnnnnnnnnnnnnnnnnnnnnnnnnnnnnnnnnnnnnnnnnnnnnnnnnnnnnnnnnnnnnnnnnnnnnnnnnnnnnnnnnnnnnnnnnnnnnnnnnnnnnnnnnnnnnnnnnnnnnnnnnnnnnnnnnnnnnnnnnnnnnnnnnnnnnnnnnnnnnnnnnnnnnnnnnnnnnnnnnnnnnnnnnnnnnnnnnnnnnnnnnnnnnnnnnnnnnnnnnnnnnnnnnnnnnnnnnnnnnnnnnnnnnnnnnnnnnnnnnnnnnnnnnnnnnnnnnnnnnnnnnnnnnnnnnnnnnnnnnnnnnnnnnnnnnnnnnnnnnnnnnnnnnnnnnnnnnnnnnnnnnnnnnnnnnnnnnnnnnnnnnnnnnnnnnnnnnnnnnnnnnnnnnnnnnnnnnnnnnnnnnnnnnnnnnnnnnnnnnnnnnnnnnnnnnnnnnnnnnnnnnnnnnnnnnnnnnnnnnnnnnnnnnnnnnnnnnnnnnnnnnnnnnnnnnnnnnnnnnnnnnnnnnnnnnnnnnnnnnnnnnnnnnnnnnnnnnnnnnnnnnnnnnnnnnnnnnnnnnnnnnnnnnnnnnnnnnnnnnnnnnnnnnnnnnnnnnnnnnnnnnnnnnnnnnnnnnnnnnnnnnnnnnnnnnnnnnnnnnnnnnnnnnnnnnnnnnnnnnnnnnnnnnnnnnnnnnnnnnnnnnnnnnnnnnnnnnnnnnnnnnnnnnnnnnnnnnnnnnnnnnnnnnnnnnnnnnnnnnnnnnnnnnnnnnnnnnnnnnnnnnnnnnnnnnnnnnnnnnnnnnnnnnnnnnnnnnnnnnnnnnnnnnnnnnnnnnnnnnnnnnnnnnnnnnnnnnnnnnnnnnnnnnnnnnnnnnnnnnnnnnnnnnnnnnnnnnnnnnnnnnnnnnnnnnnnnnnnnnnnnnnnnnnnnnnnnnnnnnnnnnnnnnnnnnnnnnnnnnnnnnnnnnnnnnnnnnnnnnnnnnnnnnnnnnnnnnnnnnnnnnnnnnnnnnnnnnnnnnnnnnnnnnnnnnnnnnnnnnnnnnnnnnnnnnnnnnnnnnnnnnnnnnnnnnnnnnnnnnnnnnnnnnnnnnnnnnnnnnnnnnnnnnnnnnnnnnnnnnnnnnnnnnnnnnnnnnnnnnnnnnnnnnnnnnnnnnnnnnnnnnnnnnnnnnnnnnnnnnnnnnnnnnnnnnnnnnnnnnnnnnnnnnnnnnnnnnnnnnnnnnnnnnnnnnnnnnnnnnnnnnnnnnnnnnnnnnnnnnnnnnnnnnnnnnnnnnnnnnnnnnnnnnnnnnnnnnnnnnnnnnnnnnnnnnnnnnnnnnnnnnnnnnnnnnnnnnnnnnnnnnnnnnnnnnnnnnnnnnnnnnnnnnnnnnnnnnnnnnnnnnnnnnnnnnnnnnnnnnnnnnnnnnnnnnnnnnnnnnnnnnnnnnnnnnnnnnnnnnnnnnnnnnnnnnnnnnnnnnnnnnnnnnnnnnnnnnnnnnnnnnnnnnnnnnnnnnnnnnnnnnnnnnnnnnnnnnnnnnnnnnnnnnnnnnnnnnnnnnnnnnnnnnnnnnnnnnnnnnnnnnnnnnnnnnnnnnnnnnnnnnnnnnnnnnnnnnnnnnnnnnnnnnnnnnnnnnnnnnnnnnnnnnnnnnnnnnnnnnnnnnnnnnnnnnnnnnnnnnnnnnnnnnnnnnnnnnnnnnnnnnnnnnnnnnnnnnnnnnnnnnnnnnnnnnnnnnnnnnnnnnnnnnnnnnnnnnnnnnnnnnnnnnnnnnnnnnnnnnnnnnnnnnnnnnnnnnnnnnnnnnnnnnnnnnnnnnnnnnnnnnnnnnnnnnnnnnnnnnnnnnnnnnnnnnnnnnnnnnnnnnnnnnnnnnnnnnnnnnnnnnnnnnnnnnnnnnnnnnnnnnnnnnnnnnnnnnnnnnnnnnnnnnnnnnnnnnnnnnnnnnnnnnnnnnnnnnnnnnnnnnnnnnnnnnnnnnnnnnnnnnnnnnnnnnnnnnnnnnnnnnnnnnnnnnnnnnnnnnnnnnnnnnnnnnnnnnnnnnnnnnnnnnnnnnnnnnnnnnnnnnnnnnnnnnnnnnnnnnnnnnnnnnnnnnnnnnnnnnnnnnnnnnnnnnnnnnnnnnnnnnnnnnnnnnnnnnnnnnnnnnnnnnnnnnnnnnnnnnnnnnnnnnnnnnnnnnnnnnnnnnnnnnnnnnnnnnnnnnnnnnnnnnnnnnnnnnnnnnnnnnnnnnnnnnnnnnnnnnnnnnnnnnnnnnnnnnnnnnnnnnnnnnnnnnnnnnnnnnnnnnnnnnnnnnnnnnnnnnnnnnnnnnnnnnnnnnnnnnnnnnnnnnnnnnnnnnnnnnnnnnnnnnnnnnnnnnnnnnnnnnnnnnnnnnnnnnnnnnnnnnnnnnnnnnnnnnnnnnnnnnnnnnnnnnnnnnnnnnnnnnnnnnnnnnnnnnnnnnnnnnnnnnnnnnnnnnnnnnnnnnnnnnnnnnnnnnnnnnnnnnnnnnnnnnnnnnnnnnnnnnnnnnnnnnnnnnnnnnnnnnnnnnnnnnnnnnnnnnnnnnnnnnnnnnnnnnnnnnnnnnnnnnnnnnnnnnnnnnnnnnnnnnnnnnnnnnnnnnnnnnnnnnnnnnnnnnnnnnnnnnnnnnnnnnnnnnnnnnnnnnnnnnnnnnnnnnnnnnnnnnnnnnnnnnnnnnnnnnnnnnnnnnnnnnnnnnnnnnnnnnnnnnnnnnnnnnnnnnnnnnnnnnnnnnnnnnnnnnnnnnnnnnnnnnnnnnnnnnnnnnnnnnnnnnnnnnnnnnnnnnnnnnnnnnnnnnnnnnnnnnnnnnnnnnnnnnnnnnnnnnnnnnnnnnnnnnnnnnnnnnnnnnnnnnnnnnnnnnnnnnnnnnnnnnnnnnnnnnnnnnnnnnnnnnnnnnnnnnnnnnnnnnnnnnnnnnnnnnnnnnnnnnnnnnnnnnnnnnnnnnnnnnnnnnnnnnnnnnnnnnnnnnnnnnnnnnnnnnnnnnnnnnnnnnnnnnnnnnnnnnnnnnnnnnnnnnnnnnnnnnnnnnnnnnnnnnnnnnnnnnnnnnnnnnnnnnnnnnnnnnnnnnnnnnnnnnnnnnnnnnnnnnnnnnnnnnnnnnnnnnnnnnnnnnnnnnnnnnnnnnnnnnnnnnnnnnnnnnnnnnnnnnnnnnnnnnnnnnnnnnnnnnnnnnnnnnnnnnnnnnnnnnnnnnnnnnnnnnnnnnnnnnnnnnnnnnnnnnnnnnnnnnnnnnnnnnnnnnnnnnnnnnnnnnnnnnnnnnnnnnnnnnnnnnnnnnnnnnnnnnnnnnnnnnnnnnnnnnnnnnnnnnnnnnnnnnnnnnnnnnnnnnnnnnnnnnnnnnnnnnnnnnnnnnnnnnnnnnnnnnnnnnnnnnnnnnnnnnnnnnnnnnnnnnnnnnnnnnnnnnnnnnnnnnnnnnnnnnnnnnnnnnnnnnnnnnnnnnnnnnnnnnnnnnnnnnnnnnnnnnnnnnnnnnnnnnnnnnnnnnnnnnnnnnnnnnnnnnnnnnnnnnnnnnnnnnnnnnnnnnnnnnnnnnnnnnnnnnnnnnnnnnnnnnnnnnnnnnnnnnnnnnnnnnnnnnnnnnnnnnnnnnnnnnnnnnnnnnnnnnnnnnnnnnnnnnnnnnnnnnnnnnnnnnnnnnnnnnnnnnnnnnnnnnnnnnnnnnnnnnnnnnnnnnnnnnnnnnnnnnnnnnnnnnnnnnnnnnnnnnnnnnnnnnnnnnnnnnnnnnnnnnnnnnnnnnnnnnnnnnnnnnnnnnnnnnnnnnnnnnnnnnnnnnnnnnnnnnnnnnnnnnnnnnnnnnnnnnnnnnnnnnnnnnnnnnnnnnnnnnnnnnnnnnnnnnnnnnnnnnnnnnnnnnnnnnnnnnnnnnnnnnnnnnnnnnnnnnnnnnnnnnnnnnnnnnnnnnnnnnnnnnnnnnnnnnnnnnnnnnnnnnnnnnnnnnnnnnnnnnnnnnnnnnnnnnnnnnnnnnnnnnnnnnnnnnnnnnnnnnnnnnnnnnnnnnnnnnnnnnnnnnnnnnnnnnnnnnnnnnnnnnnnnnnnnnnnnnnnnnnnnnnnnnnnnnnnnnnnnnnnnnnnnnnnnnnnnnnnnnnnnnnnnnnnnnnnnnnnnnnnnnnnnnnnnnnnnnnnnnnnnnnnnnnnnnnnnnnnnnnnnnnnnnnnnnnnnnnnnnnnnnnnnnnnnnnnnnnnnnnnnnnnnnnnnnnnnnnnnnnnnnnnnnnnnnnnnnnnnnnnnnnnnnnnnnnnnnnnnnnnnnnnnnnnnnnnnnnnnnnnnnnnnnnnnnnnnnnnnnnnnnnnnnnnnnnnnnnnnnnnnnnnnnnnnnnnnnnnnnnnnnnnnnnnnnnnnnnnnnnnnnnnnnnnnnnnnnnnnnnnnnnnnnnnnnnnnnnnnnnnnnnnnnnnnnnnnnnnnnnnnnnnnnnnnnnnnnnnnnnnnnnnnnnnnnnnnnnnnnnnnnnnnnnnnnnnnnnnnnnnnnnnnnnnnnnnnnnnnnnnnnnnnnnnnnnnnnnnnnnnnnnnnnnnnnnnnnnnnnnnnnnnnnnnnnnnnnnnnnnnnnnnnnnnnnnnnnnnnnnnnnnnnnnnnnnnnnnnnnnnnnnnnnnnnnnnnnnnnnnnnnnnnnnnnnnnnnnnnnnnnnnnnnnnnnnnnnnnnnnnnnnnnnnnnnnnnnnnnnnnnnnnnnnnnnnnnnnnnnnnnnnnnnnnnnnnnnnnnnnnnnnnnnnnnnnnnnnnnnnnnnnnnnnnnnnnnnnnnnnnnnnnnnnnnnnnnnnnnnnnnnnnnnnnnnnnnnnnnnnnnnnnnnnnnnnnnnnnnnnnnnnnnnnnnnnnnnnnnnnnnnnnnnnnnnnnnnnnnnnnnnnnnnnnnnnnnnnnnnnnnnnnnnnnnnnnnnnnnnnnnnnnnnnnnnnnnnnnnnnnnnnnnnnnnnnnnnnnnnnnnnnnnnnnnnnnnnnnnnnnnnnnnnnnnnnnnnnnnnnnnnnnnnnnnnnnnnnnnnnnnnnnnnnnnnnnnnnnnnnnnnnnnnnnnnnnnnnnnnnnnnnnnnnnnnnnnnnnnnnnnnnnnnnnnnnnnnnnnnnnnnnnnnnnnnnnnnnnnnnnnnnnnnnnnnnnnnnnnnnnnnnnnnnnnnnnnnnnnnnnnnnnnnnnnnnnnnnnnnnnnnnnnnnnnnnnnnnnnnnnnnnnnnnnnnnnnnnnnnnnnnnnnnnnnnnnnnnnnnnnnnnnnnnnnnnnnnnnnnnnnnnnnnnnnnnnnnnnnnnnnnnnnnnnnnnnnnnnnnnnnnnnnnnnnnnnnnnnnnnnnnnnnnnnnnnnnnnnnnnnnnnnnnnnnnnnnnnnnnnnnnnnnnnnnnnnnnnnnnnnnnnnnnnnnnnnnnnnnnnnnnnnnnnnnnnnnnnnnnnnnnnnnnnnnnnnnnnnnnnnnnnnnnnnnnnnnnnnnnnnnnnnnnnnnnnnnnnnnnnnnnnnnnnnnnnnnnnnnnnnnnnnnnnnnnnnnnnnnnnnnnnnnnnnnnnnnnnnnnnnnnnnnnnnnnnnnnnnnnnnnnnnnnnnnnnnnnnnnnnnnnnnnnnnnnnnnnnnnnnnnnnnnnnnnnnnnnnnnnnnnnnnnnnnnnnnnnnnnnnnnnnnnnnnnnnnnnnnnnnnnnnnnnnnnnnnnnnnnnnnnnnnnnnnnnnnnnnnnnnnnnnnnnnnnnnnnnnnnnnnnnnnnnnnnnnnnnnnnnnnnnnnnnnnnnnnnnnnnnnnnnnnnnnnnnnnnnnnnnnnnnnnnnnnnnnnnnnnnnnnnnnnnnnnnnnnnnnnnnnnnnnnnnnnnnnnnnnnnnnnnnnnnnnnnnnnnnnnnnnnnnnnnnnnnnnnnnnnnnnnnnnnnnnnnnnnnnnnnnnnnnnnnnnnnnnnnnnnnnnnnnnnnnnnnnnnnnnnnnnnnnnnnnnnnnnnnnnnnnnnnnnnnnnnnnnnnnnnnnnnnnnnnnnnnnnnnnnnnnnnnnnnnnnnnnnnnnnnnnnnnnnnnnnnnnnnnnnnnnnnnnnnnnnnnnnnnnnnnnnnnnnnnnnnnnnnnnnnnnnnnnnnnnnnnnnnnnnnnnnnnnnnnnnnnnnnnnnnnnnnnnnnnnnnnnnnnnnnnnnnnnnnnnnnnnnnnnnnnnnnnnnnnnnnnnnnnnnnnnnnnnnnnnnnnnnnnnnnnnnnnnnnnnnnnnnnnnnnnnnnnnnnnnnnnnnnnnnnnnnnnnnnnnnnnnnnnnnnnnnnnnnnnnnnnnnnnnnnnnnnnnnnnnnnnnnnnnnnnnnnnnnnnnnnnnnnnnnnnnnnnnnnnnnnnnnnnnnnnnnnnnnnnnnnnnnnnnnnnnnnnnnnnnnnnnnnnnnnnnnnnnnnnnnnnnnnnnnnnnnnnnnnnnnnnnnnnnnnnnnnnnnnnnnnnnnnnnnnnnnnnnnnnnnnnnnnnnnnnnnnnnnnnnnnnnnnnnnnnnnnnnnnnnnnnnnnnnnnnnnnnnnnnnnnnnnnnnnnnnnnnnnnnnnnnnnnnnnnnnnnnnnnnnnnnnnnnnnnnnnnnnnnnnnnnnnnnnnnnnnnnnnnnnnnnnnnnnnnnnnnnnnnnnnnnnnnnnnnnnnnnnnnnnnnnnnnnnnnnnnnnnnnnnnnnnnnnnnnnnnnnnnnnnnnnnnnnnnnnnnnnnnnnnnnnnnnnnnnnnnnnnnnnnnnnnnnnnnnnnnnnnnnnnnnnnnnnnnnnnnnnnnnnnnnnnnnnnnnnnnnnnnnnnnnnnnnnnnnnnnnnnnnnnnnnnnnnnnnnnnnnnnnnnnnnnnnnnnnnnnnnnnnnnnnnnnnnnnnnnnnnnnnnnnnnnnnnnnnnnnnnnnnnnnnnnnnnnnnnnnnnnnnnnnnnnnnnnnnnnnnnnnnnnnnnnnnnnnnnnnnnnnnnnnnnnnnnnnnnnnnnnnnnnnnnnnnnnnnnnnnnnnnnnnnnnnnnnnnnnnnnnnnnnnnnnnnnnnnnnnnnnnnnnnnnnnnnnnnnnnnnnnnnnnnnnnnnnnnnnnnnnnnnnnnnnnnnnnnnnnnnnnnnnnnnnnnnnnnnnnnnnnnnnnnnnnnnnnnnnnnnnnnnnnnnnnnnnnnnnnnnnnnnnnnnnnnnnnnnnnnnnnnnnnnnnnnnnnnnnnnnnnnnnnnnnnnnnnnnnnnnnnnnnnnnnnnnnnnnnnnnnnnnnnnnnnnnnnnnnnnnnnnnnnnnnnnnnnnnnnnnnnnnnnnnnnnnnnnnnnnnnnnnnnnnnnnnnnnnnnnnnnnnnnnnnnnnnnnnnnnnnnnnnnnnnnnnnnnnnnnnnnnnnnnnnnnnnnnnnnnnnnnnnnnnnnnnnnnnnnnnnnnnnnnnnnnnnnnnnnnnnnnnnnnnnnnnnnnnnnnnnnnnnnnnnnnnnnnnnnnnnnnnnnnnnnnnnnnnnnnnnnnnnnnnnnnnnnnnnnnnnnnnnnnnnnnnnnnnnnnnnnnnnnnnnnnnnnnnnnnnnnnnnnnnnnnnnnnnnnnnnnnnnnnnnnnnnnnnnnnnnnnnnnnnnnnnnnnnnnnnnnnnnnnnnnnnnnnnnnnnnnnnnnnnnnnnnnnnnnnnnnnnnnnnnnnnnnnnnnnnnnnnnnnnnnnnnnnnnnnnnnnnnnnnnnnnnnnnnnnnnnnnnnnnnnnnnnnnnnnnnnnnnnnnnnnnnnnnnnnnnnnnnnnnnnnnnnnnnnnnnnnnnnnnnnnnnnnnnnnnnnnnnnnnnnnnnnnnnnnnnnnnnnnnnnnnnnnnnnnnnnnnnnnnnnnnnnnnnnnnnnnnnnnnnnnnnnnnnnnnnnnnnnnnnnnnnnnnnnnnnnnnnnnnnnnnnnnnnnnnnnnnnnnnnnnnnnnnnnnnnnnnnnnnnnnnnnnnnnnnnnnnnnnnnnnnnnnnnnnnnnnnnnnnnnnnnnnnnnnnnnnnnnnnnnnnnnnnnnnnnnnnnnnnnnnnnnnnnnnnnnnnnnnnnnnnnnnnnnnnnnnnnnnnnnnnnnnnnnnnnnnnnnnnnnnnnnnnnnnnnnnnnnnnnnnnnnnnnnnnnnnnnnnnnnnnnnnnnnnnnnnnnnnnnnnnnnnnnnnnnnnnnnnnnnnnnnnnnnnnnnnnnnnnnnnnnnnnnnnnnnnnnnnnnnnnnnnnnnnnnnnnnnnnnnnnnnnnnnnnnnnnnnnnnnnnnnnnnnnnnnnnnnnnnnnnnnnnnnnnnnnnnnnnnnnnnnnnnnnnnnnnnnnnnnnnnnnnnnnnnnnnnnnnnnnnnnnnnnnnnnnnnnnnnnnnnnnnnnnnnnnnnnnnnnnnnnnnnnnnnnnnnnnnnnnnnnnnnnnnnnnnnnnnnnnnnnnnnnnnnnnnnnnnnnnnnnnnnnnnnnnnnnnnnnnnnnnnnnnnnnnnnnnnnnnnnnnnnnnnnnnnnnnnnnnnnnnnnnnnnnnnnnnnnnnnnnnnnnnnnnnnnnnnnnnnnnnnnnnnnnnnnnnnnnnnnnnnnnnnnnnnnnnnnnnnnnnnnnnnnnnnnnnnnnnnnnnnnnnnnnnnnnnnnnnnnnnnnnnnnnnnnnnnnnnnnnnnnnnnnnnnnnnnnnnnnnnnnnnnnnnnnnnnnnnnnnnnnnnnnnnnnnnnnnnnnnnnnnnnnnnnnnnnnnnnnnnnnnnnnnnnnnnnnnnnnnnnnnnnnnnnnnnnnnnnnnnnnnnnnnnnnnnnnnnnnnnnnnnnnnnnnnnnnnnnnnnnnnnnnnnnnnnnnnnnnnnnnnnnnnnnnnnnnnnnnnnnnnnnnnnnnnnnnnnnnnnnnnnnnnnnnnnnnnnnnnnnnnnnnnnnnnnnnnnnnnnnnnnnnnnnnnnnnnnnnnnnnnnnnnnnnnnnnnnnnnnnnnnnnnnnnnnnnnnnnnnnnnnnnnnnnnnnnnnnnnnnnnnnnnnnnnnnnnnnnnnnnnnnnnnnnnnnnnnnnnnnnnnnnnnnnnnnnnnnnnnnnnnnnnnnnnnnnnnnnnnnnnnnnnnnnnnnnnnnnnnnnnnnnnnnnnnnnnnnnnnnnnnnnnnnnnnnnnnnnnnnnnnnnnnnnnnnnnnnnnnnnnnnnnnnnnnnnnnnnnnnnnnnnnnnnnnnnnnnnnnnnnnnnnnnnnnnnnnnnnnnnnnnnnnnnnnnnnnnnnnnnnnnnnnnnnnnnnnnnnnnnnnnnnnnnnnnnnnnnnnnnnnnnnnnnnnnnnnnnnnnnnnnnnnnnnnnnnnnnnnnnnnnnnnnnnnnnnnnnnnnnnnnnnnnnnnnnnnnnnnnnnnnnnnnnnnnnnnnnnnnnnnnnnnnnnnnnnnnnnnnnnnnnnnnnnnnnnnnnnnnnnnnnnnnnnnnnnnnnnnnnnnnnnnnnnnnnnnnnnnnnnnnnnnnnnnnnnnnnnnnnnnnnnnnnnnnnnnnnnnnnnnnnnnnnnnnnnnnnnnnnnnnnnnnnnnnnnnnnnnnnnnnnnnnnnnnnnnnnnnnnnnnnnnnnnnnnnnnnnnnnnnnnnnnnnnnnnnnnnnnnnnnnnnnnnnnnnnnnnnnnnnnnnnnnnnnnnnnnnnnnnnnnnnnnnnnnnnnnnnnnnnnnnnnnnnnnnnnnnnnnnnnnnnnnnnnnnnnnnnnnnnnnnnnnnnnnnnnnnnnnnnnnnnnnnnnnnnnnnnnnnnnnnnnnnnnnnnnnnnnnnnnnnnnnnnnnnnnnnnnnnnnnnnnnnnnnnnnnnnnnnnnnnnnnnnnnnnnnnnnnnnnnnnnnnnnnnnnnnnnnnnnnnnnnnnnnnnnnnnnnnnnnnnnnnnnnnnnnnnnnnnnnnnnnnnnnnnnnnnnnnnnnnnnnnnnnnnnnnnnnnnnnnnnnnnnnnnnnnnnnnnnnnnnnnnnnnnnnnnnnnnnnnnnnnnnnnnnnnnnnnnnnnnnnnnnnnnnnnnnnnnnnnnnnnnnnnnnnnnnnnnnnnnnnnnnnnnnnnnnnnnnnnnnnnnnnnnnnnnnnnnnnnnnnnnnnnnnnnnnnnnnnnnnnnnnnnnnnnnnnnnnnnnnnnnnnnnnnnnnnnnnnnnnnnnnnnnnnnnnnnnnnnnnnnnnnnnnnnnnnnnnnnnnnnnnnnnnnnnnnnnnnnnnnnnnnnnnnnnnnnnnnnnnnnnnnnnnnnnnnnnnnnnnnnnnnnnnnnnnnnnnnnnnnnnnnnnnnnnnnnnnnnnnnnnnnnnnnnnnnnnnnnnnnnnnnnnnnnnnnnnnnnnnnnnnnnnnnnnnnnnnnnnnnnnnnnnnnnnnnnnnnnnnnnnnnnnnnnnnnnnnnnnnnnnnnnnnnnnnnnnnnnnnnnnnnnnnnnnnnnnnnnnnnnnnnnnnnnnnnnnnnnnnnnnnnnnnnnnnnnnnnnnnnnnnnnnnnnnnnnnnnnnnnnnnnnnnnnnnnnnnnnnnnnnnnnnnnnnnnnnnnnnnnnnnnnnnnnnnnnnnnnnnnnnnnnnnnnnnnnnnnnnnnnnnnnnnnnnnnnnnnnnnnnnnnnnnnnnnnnnnnnnnnnnnnnnnnnnnnnnnnnnnnnnnnnnnnnnnnnnnnnnnnnnnnnnnnnnnnnnnnnnnnnnnnnnnnnnnnnnnnnnnnnnnnnnnnnnnnnnnnnnnnnnnnnnnnnnnnnnnnnnnnnnnnnnnnnnnnnnnnnnnnnnnnnnnnnnnnnnnnnnnnnnnnnnnnnnnnnnnnnnnnnnnnnnnnnnnnnnnnnnnnnnnnnnnnnnnnnnnnnnnnnnnnnnnnnnnnnnnnnnnnnnnnnnnnnnnnnnnnnnnnnnnnnnnnnnnnnnnnnnnnnnnnnnnnnnnnnnnnnnnnnnnnnnnnnnnnnnnnnnnnnnnnnnnnnnnnnnnnnnnnnnnnnnnnnnnnnnnnnnnnnnnnnnnnnnnnnnnnnnnnnnnnnnnnnnnnnnnnnnnnnnnnnnnnnnnnnnnnnnnnnnnnnnnnnnnnnnnnnnnnnnnnnnnnnnnnnnnnnnnnnnnnnnnnnnnnnnnnnnnnnnnnnnnnnnnnnnnnnnnnnnnnnnnnnnnnnnnnnnnnnnnnnnnnnnnnnnnnnnnnnnnnnnnnnnnnnnnnnnnnnnnnnnnnnnnnnnnnnnnnnnnnnnnnnnnnnnnnnnnnnnnnnnnnnnnnnnnnnnnnnnnnnnnnnnnnnnnnnnnnnnnnnnnnnnnnnnnnnnnnnnnnnnnnnnnnnnnnnnnnnnnnnnnnnnnnnnnnnnnnnnnnnnnnnnnnnnnnnnnnnnnnnnnnnnnnnnnnnnnnnnnnnnnnnnnnnnnnnnnnnnnnnnnnnnnnnnnnnnnnnnnnnnnnnnnnnnnnnnnnnnnnnnnnnnnnnnnnnnnnnnnnnnnnnnnnnnnnnnnnnnnnnnnnnnnnnnnnnnnnnnnnnnnnnnnnnnnnnnnnnnnnnnnnnnnnnnnnnnnnnnnnnnnnnnnnnnnnnnnnnnnnnnnnnnnnnnnnnnnnnnnnnnnnnnnnnnnnnnnnnnnnnnnnnnnnnnnnnnnnnnnnnnnnnnnnnnnnnnnnnnnnnnnnnnnnnnnnnnnnnnnnnnnnnnnnnnnnnnnnnnnnnnnnnnnnnnnnnnnnnnnnnnnnnnnnnnnnnnnnnnnnnnnnnnnnnnnnnnnnnnnnnnnnnnnnnnnnnnnnnnnnnnnnnnnnnnnnnnnnnnnnnnnnnnnnnnnnnnnnnnnnnnnnnnnnnnnnnnnnnnnnnnnnnnnnnnnnnnnnnnnnnnnnnnnnnnnnnnnnnnnnnnnnnnnnnnnnnnnnnnnnnnnnnnnnnnnnnnnnnnnnnnnnnnnnnnnnnnnnnnnnnnnnnnnnnnnnnnnnnnnnnnnnnnnnnnnnnnnnnnnnnnnnnnnnnnnnnnnnnnnnnnnnnnnnnnnnnnnnnnnnnnnnnnnnnnnnnnnnnnnnnnnnnnnnnnnnnnnnnnnnnnnnnnnnnnnnnnnnnnnnnnnnnnnnnnnnnnnnnnnnnnnnnnnnnnnnnnnnnnnnnnnnnnnnnnnnnnnnnnnnnnnnnnnnnnnnnnnnnnnnnnnnnnnnnnnnnnnnnnnnnnnnnnnnnnnnnnnnnnnnnnnnnnnnnnnnnnnnnnnnnnnnnnnnnnnnnnnnnnnnnnnnnnnnnnnnnnnnnnnnnnnnnnnnnnnnnnnnnnnnnnnnnnnnnnnnnnnnnnnnnnnnnnnnnnnnnnnnnnnnnnnnnnnnnnnnnnnnnnnnnnnnnnnnnnnnnnnnnnnnnnnnnnnnnnnnnnnnnnnnnnnnnnnnnnnnnnnnnnnnnnnnnnnnnnnnnnnnnnnnnnnnnnnnnnnnnnnnnnnnnnnnnnnnnnnnnnnnnnnnnnnnnnnnnnnnnnnnnnnnnnnnnnnnnnnnnnnnnnnnnnnnnnnnnnnnnnnnnnnnnnnnnnnnnnnnnnnnnnnnnnnnnnnnnnnnnnnnnnnnnnnnnnnnnnnnnnnnnnnnnnnnnnnnnnnnnnnnnnnnnnnnnnnnnnnnnnnnnnnnnnnnnnnnnnnnnnnnnnnnnnnnnnnnnnnnnnnnnnnnnnnnnnnnnnnnnnnnnnnnnnnnnnnnnnnnnnnnnnnnnnnnnnnnnnnnnnnnnnnnnnnnnnnnnnnnnnnnnnnnnnnnnnnnnnnnnnnnnnnnnnnnnnnnnnnnnnnnnnnnnnnnnnnnnnnnnnnnnnnnnnnnnnnnnnnnnnnnnnnnnnnnnnnnnnnnnnnnnnnnnnnnnnnnnnnnnnnnnnnnnnnnnnnnnnnnnnnnnnnnnnnnnnnnnnnnnnnnnnnnnnnnnnnnnnnnnnnnnnnnnnnnnnnnnnnnnnnnnnnnnnnnnnnnnnnnnnnnnnnnnnnnnnnnnnnnnnnnnnnnnnnnnnnnnnnnnnnnnnnnnnnnnnnnnnnnnnnnnnnnnnnnnnnnnnnnnnnnnnnnnnnnnnnnnnnnnnnnnnnnnnnnnnnnnnnnnnnnnnnnnnnnnnnnnnnnnnnnnnnnnnnnnnnnnnnnnnnnnnnnnnnnnnnnnnnnnnnnnnnnnnnnnnnnnnnnnnnnnnnnnnnnnnnnnnnnnnnnnnnnnnnnnnnnnnnnnnnnnnnnnnnnnnnnnnnnnnnnnnnnnnnnnnnnnnnnnnnnnnnnnnnnnnnnnnnnnnnnnnnnnnnnnnnnnnnnnnnnnnnnnnnnnnnnnnnnnnnnnnnnnnnnnnnnnnnnnnnnnnnnnnnnnnnnnnnnnnnnnnnnnnnnnnnnnnnnnnnnnnnnnnnnnnnnnnnnnnnnnnnnnnnnnnnnnnnnnnnnnnnnnnnnnnnnnnnnnnnnnnnnnnnnnnnnnnnnnnnnnnnnnnnnnnnnnnnnnnnnnnnnnnnnnnnnnnnnnnnnnnnnnnnnnnnnnnnnnnnnnnnnnnnnnnnnnnnnnnnnnnnnnnnnnnnnnnnnnnnnnnnnnnnnnnnnnnnnnnnnnnnnnnnnnnnnnnnnnnnnnnnnnnnnnnnnnnnnnnnnnnnnnnnnnnnnnnnnnnnnnnnnnnnnnnnnnnnnnnnnnnnnnnnnnnnnnnnnnnnnnnnnnnnnnnnnnnnnnnnnnnnnnnnnnnnnnnnnnnnnnnnnnnnnnnnnnnnnnnnnnnnnnnnnnnnnnnnnnnnnnnnnnnnnnnnnnnnnnnnnnnnnnnnnnnnnnnnnnnnnnnnnnnnnnnnnnnnnnnnnnnnnnnnnnnnnnnnnnnnnnnnnnnnnnnnnnnnnnnnnnnnnnnnnnnnnnnnnnnnnnnnnnnnnnnnnnnnnnnnnnnnnnnnnnnnnnnnnnnnnnnnnnnnnnnnnnnnnnnnnnnnnnnnnnnnnnnnnnnnnnnnnnnnnnnnnnnnnnnnnnnnnnnnnnnnnnnnnnnnnnnnnnnnnnnnnnnnnnnnnnnnnnnnnnnnnnnnnnnnnnnnnnnnnnnnnnnnnnnnnnnnnnnnnnnnnnnnnnnnnnnnnnnnnnnnnnnnnnnnnnnnnnnnnnnnnnnnnnnnnnnnnnnnnnnnnnnnnnnnnnnnnnnnnnnnnnnnnnnnnnnnnnnnnnnnnnnnnnnnnnnnnnnnnnnnnnnnnnnnnnnnnnnnnnnnnnnnnnnnnnnnnnnnnnnnnnnnnnnnnnnnnnnnnnnnnnnnnnnnnnnnnnnnnnnnnnnnnnnnnnnnnnnnnnnnnnnnnnnnnnnnnnnnnnnnnnnnnnnnnnnnnnnnnnnnnnnnnnnnnnnnnnnnnnnnnnnnnnnnnnnnnnnnnnnnnnnnnnnnnnnnnnnnnnnnnnnnnnnnnnnnnnnnnnnnnnnnnnnnnnnnnnnnnnnnnnnnnnnnnnnnnnnnnnnnnnnnnnnnnnnnnnnnnnnnnnnnnnnnnnnnnnnnnnnnnnnnnnnnnnnnnnnnnnnnnnnnnnnnnnnnnnnnnnnnnnnnnnnnnnnnnnnnnnnnnnnnnnnnnnnnnnnnnnnnnnnnnnnnnnnnnnnnnnnnnnnnnnnnnnnnnnnnnnnnnnnnnnnnnnnnnnnnnnnnnnnnnnnnnnnnnnnnnnnnnnnnnnnnnnnnnnnnnnnnnnnnnnnnnnnnnnnnnnnnnnnnnnnnnnnnnnnnnnnnnnnnnnnnnnnnnnnnnnnnnnnnnnnnnnnnnnnnnnnnnnnnnnnnnnnnnnnnnnnnnnnnnnnnnnnnnnnnnnnnnnnnnnnnnnnnnnnnnnnnnnnnnnnnnnnnnnnnnnnnnnnnnnnnnnnnnnnnnnnnnnnnnnnnnnnnnnnnnnnnnnnnnnnnnnnnnnnnnnnnnnnnnnnnnnnnnnnnnnnnnnnnnnnnnnnnnnnnnnnnnnnnnnnnnnnnnnnnnnnnnnnnnnnnnnnnnnnnnnnnnnnnnnnnnnnnnnnnnnnnnnnnnnnnnnnnnnnnnnnnnnnnnnnnnnnnnnnnnnnnnnnnnnnnnnnnnnnnnnnnnnnnnnnnnnnnnnnnnnnnnnnnnnnnnnnnnnnnnnnnnnnnnnnnnnnnnnnnnnnnnnnnnnnnnnnnnnnnnnnnnnnnnnnnnnnnnnnnnnnnnnnnnnnnnnnnnnnnnnnnnnnnnnnnnnnnnnnnnnnnnnnnnnnnnnnnnnnnnnnnnnnnnnnnnnnnnnnnnnnnnnnnnnnnnnnnnnnnnnnnnnnnnnnnnnnnnnnnnnnnnnnnnnnnnnnnnnnnnnnnnnnnnnnnnnnnnnnnnnnnnnnnnnnnnnnnnnnnnnnnnnnnnnnnnnnnnnnnnnnnnnnnnnnnnnnnnnnnnnnnnnnnnnnnnnnnnnnnnnnnnnnnnnnnnnnnnnnnnnnnnnnnnnnnnnnnnnnnnnnnnnnnnnnnnnnnnnnnnnnnnnnnnnnnnnnnnnnnnnnnnnnnnnnnnnnnnnnnnnnnnnnnnnnnnnnnnnnnnnnnnnnnnnnnnnnnnnnnnnnnnnnnnnnnnnnnnnnnnnnnnnnnnnnnnnnnnnnnnnnnnnnnnnnnnnnnnnnnnnnnnnnnnnnnnnnnnnnnnnnnnnnnnnnnnnnnnnnnnnnnnnnnnnnnnnnnnnnnnnnnnnnnnnnnnnnnnnnnnnnnnnnnnnnnnnnnnnnnnnnnnnnnnnnnnnnnnnnnnnnnnnnnnnnnnnnnnnnnnnnnnnnnnnnnnnnnnnnnnnnnnnnnnnnnnnnnnnnnnnnnnnnnnnnnnnnnnnnnnnnnnnnnnnnnnnnnnnnnnnnnnnnnnnnnnnnnnnnnnnnnnnnnnnnnnnnnnnnnnnnnnnnnnnnnnnnnnnnnnnnnnnnnnnnnnnnnnnnnnnnnnnnnnnnnnnnnnnnnnnnnnnnnnnnnnnnnnnnnnnnnnnnnnnnnnnnnnnnnnnnnnnnnnnnnnnnnnnnnnnnnnnnnnnnnnnnnnnnnnnnnnnnnnnnnnnnnnnnnnnnnnnnnnnnnnnnnnnnnnnnnnnnnnnnnnnnnnnnnnnnnnnnnnnnnnnnnnnnnnnnnnnnnnnnnnnnnnnnnnnnnnnnnnnnnnnnnnnnnnnnnnnnnnnnnnnnnnnnnnnnnnnnnnnnnnnnnnnnnnnnnnnnnnnnnnnnnnnnnnnnnnnnnnnnnnnnnnnnnnnnnnnnnnnnnnnnnnnnnnnnnnnnnnnnnnnnnnnnnnnnnnnnnnnnnnnnnnnnnnnnnnnnnnnnnnnnnnnnnnnnnnnnnnnnnnnnnnnnnnnnnnnnnnnnnnnnnnnnnnnnnnnnnnnnnnnnnnnnnnnnnnnnnnnnnnnnnnnnnnnnnnnnnnnnnnnnnnnnnnnnnnnnnnnnnnnnnnnnnnnnnnnnnnnnnnnnnnnnnnnnnnnnnnnnnnnnnnnnnnnnnnnnnnnnnnnnnnnnnnnnnnnnnnnnnnnnnnnnnnnnnnnnnnnnnnnnnnnnnnnnnnnnnnnnnnnnnnnnnnnnnnnnnnnnnnnnnnnnnnnnnnnnnnnnnnnnnnnnnnnnnnnnnnnnnnnnnnnnnnnnnnnnnnnnnnnnnnnnnnnnnnnnnnnnnnnnnnnnnnnnnnnnnnnnnnnnnnnnnnnnnnnnnnnnnnnnnnnnnnnnnnnnnnnnnnnnnnnnnnnnnnnnnnnnnnnnnnnnnnnnnnnnnnnnnnnnnnnnnnnnnnnnnnnnnnnnnnnnnnnnnnnnnnnnnnnnnnnnnnnnnnnnnnnnnnnnnnnnnnnnnnnnnnnnnnnnnnnnnnnnnnnnnnnnnnnnnnnnnnnnnnnnnnnnnnnnnnnnnnnnnnnnnnnnnnnnnnnnnnnnnnnnnnnnnnnnnnnnnnnnnnnnnnnnnnnnnnnnnnnnnnnnnnnnnnnnnnnnnnnnnnnnnnnnnnnnnnnnnnnnnnnnnnnnnnnnnnnnnnnnnnnnnnnnnnnnnnnnnnnnnnnnnnnnnnnnnnnnnnnnnnnnnnnnnnnnnnnnnnnnnnnnnnnnnnnnnnnnnnnnnnnnnnnnnnnnnnnnnnnnnnnnnnnnnnnnnnnnnnnnnnnnnnnnnnnnnnnnnnnnnnnnnnnnnnnnnnnnnnnnnnnnnnnnnnnnnnnnnnnnnnnnnnnnnnnnnnnnnnnnnnnnnnnnnnnnnnnnnnnnnnnnnnnnnnnnnnnnnnnnnnnnnnnnnnnnnnnnnnnnnnnnnnnnnnnnnnnnnnnnnnnnnnnnnnnnnnnnnnnnnnnnnnnnnnnnnnnnnnnnnnnnnnnnnnnnnnnnnnnnnnnnnnnnnnnnnnnnnnnnnnnnnnnnnnnnnnnnnnnnnnnnnnnnnnnnnnnnnnnnnnnnnnnnnnnnnnnnnnnnnnnnnnnnnnnnnnnnnnnnnnnnnnnnnnnnnnnnnnnnnnnnnnnnnnnnnnnnnnnnnnnnnnnnnnnnnnnnnnnnnnnnnnnnnnnnnnnnnnnnnnnnnnnnnnnnnnnnnnnnnnnnnnnnnnnnnnnnnnnnnnnnnnnnnnnnnnnnnnnnnnnnnnnnnnnnnnnnnnnnnnnnnnnnnnnnnnnnnnnnnnnnnnnnnnnnnnnnnnnnnnnnnnnnnnnnnnnnnnnnnnnnnnnnnnnnnnnnnnnnnnnnnnnnnnnnnnnnnnnnnnnnnnnnnnnnnnnnnnnnnnnnnnnnnnnnnnnnnnnnnnnnnnnnnnnnnnnnnnnnnnnnnnnnnnnnnnnnnnnnnnnnnnnnnnnnnnnnnnnnnnnnnnnnnnnnnnnnnnnnnnnnnnnnnnnnnnnnnnnnnnnnnnnnnnnnnnnnnnnnnnnnnnnnnnnnnnnnnnnnnnnnnnnnnnnnnnnnnnnnnnnnnnnnnnnnnnnnnnnnnnnnnnnnnnnnnnnnnnnnnnnnnnnnnnnnnnnnnnnnnnnnnnnnnnnnnnnnnnnnnnnnnnnnnnnnnnnnnnnnnnnnnnnnnnnnnnnnnnnnnnnnnnnnnnnnnnnnnnnnnnnnnnnnnnnnnnnnnnnnnnnnnnnnnnnnnnnnnnnnnnnnnnnnnnnnnnnnnnnnnnnnnnnnnnnnnnnnnnnnnnnnnnnnnnnnnnnnnnnnnnnnnnnnnnnnnnnnnnnnnnnnnnnnnnnnnnnnnnnnnnnnnnnnnnnnnnnnnnnnnnnnnnnnnnnnnnnnnnnnnnnnnnnnnnnnnnnnnnnnnnnnnnnnnnnnnnnnnnnnnnnnnnnnnnnnnnnnnnnnnnnnnnnnnnnnnnnnnnnnnnnnnnnnnnnnnnnnnnnnnnnnnnnnnnnnnnnnnnnnnnnnnnnnnnnnnnnnnnnnnnnnnnnnnnnnnnnnnnnnnnnnnnnnnnnnnnnnnnnnnnnnnnnnnnnnnnnnnnnnnnnnnnnnnnnnnnnnnnnnnnnnnnnnnnnnnnnnnnnnnnnnnnnnnnnnnnnnnnnnnnnnnnnnnnnnnnnnnnnnnnnnnnnnnnnnnnnnnnnnnnnnnnnnnnnnnnnnnnnnnnnnnnnnnnnnnnnnnnnnnnnnnnnnnnnnnnnnnnnnnnnnnnnnnnnnnnnnnnnnnnnnnnnnnnnnnnnnnnnnnnnnnnnnnnnnnnnnnnnnnnnnnnnnnnnnnnnnnnnnnnnnnnnnnnnnnnnnnnnnnnnnnnnnnnnnnnnnnnnnnnnnnnnnnnnnnnnnnnnnnnnnnnnnnnnnnnnnnnnnnnnnnnnnnnnnnnnnnnnnnnnnnnnnnnnnnnnnnnnnnnnnnnnnnnnnnnnnnnnnnnnnnnnnnnnnnnnnnnnnnnnnnnnnnnnnnnnnnnnnnnnnnnnnnnnnnnnnnnnnnnnnnnnnnnnnnnnnnnnnnnnnnnnnnnnnnnnnnnnnnnnnnnnnnnnnnnnnnnnnnnnnnnnnnnnnnnnnnnnnnnnnnnnnnnnnnnnnnnnnnnnnnnnnnnnnnnnnnnnnnnnnnnnnnnnnnnnnnnnnnnnnnnnnnnnnnnnnnnnnnnnnnnnnnnnnnnnnnnnnnnnnnnnnnnnnnnnnnnnnnnnnnnnnnnnnnnnnnnnnnnnnnnnnnnnnnnnnnnnnnnnnnnnnnnnnnnnnnnnnnnnnnnnnnnnnnnnnnnnnnnnnnnnnnnnnnnnnnnnnnnnnnnnnnnnnnnnnnnnnnnnnnnnnnnnnnnnnnnnnnnnnnnnnnnnnnnnnnnnnnnnnnnnnnnnnnnnnnnnnnnnnnnnnnnnnnnnnnnnnnnnnnnnnnnnnnnnnnnnnnnnnnnnnnnnnnnnnnnnnnnnnnnnnnnnnnnnnnnnnnnnnnnnnnnnnnnnnnnnnnnnnnnnnnnnnnnnnnnnnnnnnnnnnnnnnnnnnnnnnnnnnnnnnnnnnnnnnnnnnnnnnnnnnnnnnnnnnnnnnnnnnnnnnnnnnnnnnnnnnnnnnnnnnnnnnnnnnnnnnnnnnnnnnnnnnnnnnnnnnnnnnnnnnnnnnnnnnnnnnnnnnnnnnnnnnnnnnnnnnnnnnnnnnnnnnnnnnnnnnnnnnnnnnnnnnnnnnnnnnnnnnnnnnnnnnnnnnnnnnnnnnnnnnnnnnnnnnnnnnnnnnnnnnnnnnnnnnnnnnnnnnnnnnnnnnnnnnnnnnnnnnnnnnnnnnnnnnnnnnnnnnnnnnnnnnnnnnnnnnnnnnnnnnnnnnnnnnnnnnnnnnnnnnnnnnnnnnnnnnnnnnnnnnnnnnnnnnnnnnnnnnnnnnnnnnnnnnnnnnnnnnnnnnnnnnnnnnnnnnnnnnnnnnnnnnnnnnnnnnnnnnnnnnnnnnnnnnnnnnnnnnnnnnnnnnnnnnnnnnnnnnnnnnnnnnnnnnnnnnnnnnnnnnnnnnnnnnnnnnnnnnnnnnnnnnnnnnnnnnnnnnnnnnnnnnnnnnnnnnnnnnnnnnnnnnnnnnnnnnnnnnnnnnnnnnnnnnnnnnnnnnnnnnnnnnnnnnnnnnnnnnnnnnnnnnnnnnnnnnnnnnnnnnnnnnnnnnnnnnnnnnnnnnnnnnnnnnnnnnnnnnnnnnnnnnnnnnnnnnnnnnnnnnnnnnnnnnnnnnnnnnnnnnnnnnnnnnnnnnnnnnnnnnnnnnnnnnnnnnnnnnnnnnnnnnnnnnnnnnnnnnnnnnnnnnnnnnnnnnnnnnnnnnnnnnnnnnnnnnnnnnnnnnnnnnnnnnnnnnnnnnnnnnnnnnnnnnnnnnnnnnnnnnnnnnnnnnnnnnnnnnnnnnnnnnnnnnnnnnnnnnnnnnnnnnnnnnnnnnnnnnnnnnnnnnnnnnnnnnnnnnnnnnnnnnnnnnnnnnnnnnnnnnnnnnnnnnnnnnnnnnnnnnnnnnnnnnnnnnnnnnnnnnnnnnnnnnnnnnnnnnnnnnnnnnnnnnnnnnnnnnnnnnnnnnnnnnnnnnnnnnnnnnnnnnnnnnnnnnnnnnnnnnnnnnnnnnnnnnnnnnnnnnnnnnnnnnnnnnnnnnnnnnnnnnnnnnnnnnnnnnnnnnnnnnnnnnnnnnnnnnnnnnnnnnnnnnnnnnnnnnnnnnnnnnnnnnnnnnnnnnnnnnnnnnnnnnnnnnnnnnnnnnnnnnnnnnnnnnnnnnnnnnnnnnnnnnnnnnnnnnnnnnnnnnnnnnnnnnnnnnnnnnnnnnnnnnnnnnnnnnnnnnnnnnnnnnnnnnnnnnnnnnnnnnnnnnnnnnnnnnnnnnnnnnnnnnnnnnnnnnnnnnnnnnnnnnnnnnnnnnnnnnnnnnnnnnnnnnnnnnnnnnnnnnnnnnnnnnnnnnnnnnnnnnnnnnnnnnnnnnnnnnnnnnnnnnnnnnnnnnnnnnnnnnnnnnnnnnnnnnnnnnnnnnnnnnnnnnnnnnnnnnnnnnnnnnnnnnnnnnnnnnnnnnnnnnnnnnnnnnnnnnnnnnnnnnnnnnnnnnnnnnnnnnnnnnnnnnnnnnnnnnnnnnnnnnnnnnnnnnnnnnnnnnnnnnnnnnnnnnnnnnnnnnnnnnnnnnnnnnnnnnnnnnnnnnnnnnnnnnnnnnnnnnnnnnnnnnnnnnnnnnnnnnnnnnnnnnnnnnnnnnnnnnnnnnnnnnnnnnnnnnnnnnnnnnnnnnnnnnnnnnnnnnnnnnnnnnnnnnnnnnnnnnnnnnnnnnnnnnnnnnnnnnnnnnnnnnnnnnnnnnnnnnnnnnnnnnnnnnnnnnnnnnnnnnnnnnnnnnnnnnnnnnnnnnnnnnnnnnnnnnnnnnnnnnnnnnnnnnnnnnnnnnnnnnnnnnnnnnnnnnnnnnnnnnnnnnnnnnnnnnnnnnnnnnnnnnnnnnnnnnnnnnnnnnnnnnnnnnnnnnnnnnnnnnnnnnnnnnnnnnnnnnnnnnnnnnnnnnnnnnnnnnnnnnnnnnnnnnnnnnnnnnnnnnnnnnnnnnnnnnnnnnnnnnnnnnnnnnnnnnnnnnnnnnnnnnnnnnnnnnnnnnnnnnnnnnnnnnnnnnnnnnnnnnnnnnnnnnnnnnnnnnnnnnnnnnnnnnnnnnnnnnnnnnnnnnnnnnnnnnnnnnnnnnnnnnnnnnnnnnnnnnnnnnnnnnnnnnnnnnnnnnnnnnnnnnnnnnnnnnnnnnnnnnnnnnnnnnnnnnnnnnnnnnnnnnnnnnnnnnnnnnnnnnnnnnnnnnnnnnnnnnnnnnnnnnnnnnnnnnnnnnnnnnnnnnnnnnnnnnnnnnnnnnnnnnnnnnnnnnnnnnnnnnnnnnnnnnnnnnnnnnnnnnnnnnnnnnnnnnnnnnnnnnnnnnnnnnnnnnnnnnnnnnnnnnnnnnnnnnnnnnnnnnnnnnnnnnnnnnnnnnnnnnnnnnnnnnnnnnnnnnnnnnnnnnnnnnnnnnnnnnnnnnnnnnnnnnnnnnnnnnnnnnnnnnnnnnnnnnnnnnnnnnnnnnnnnnnnnnnnnnnnnnnnnnnnnnnnnnnnnnnnnnnnnnnnnnnnnnnnnnnnnnnnnnnnnnnnnnnnnnnnnnnnnnnnnnnnnnnnnnnnnnnnnnnnnnnnnnnnnnnnnnnnnnnnnnnnnnnnnnnnnnnnnnnnnnnnnnnnnnnnnnnnnnnnnnnnnnnnnnnnnnnnnnnnnnnnnnnnnnnnnnnnnnnnnnnnnnnnnnnnnnnnnnnnnnnnnnnnnnnnnnnnnnnnnnnnnnnnnnnnnnnnnnnnnnnnnnnnnnnnnnnnnnnnnnnnnnnnnnnnnnnnnnnnnnnnnnnnnnnnnnnnnnnnnnnnnnnnnnnnnnnnnnnnnnnnnnnnnnnnnnnnnnnnnnnnnnnnnnnnnnnnnnnnnnnnnnnnnnnnnnnnnnnnnnnnnnnnnnnnnnnnnnnnnnnnnnnnnnnnnnnnnnnnnnnnnnnnnnnnnnnnnnnnnnnnnnnnnnnnnnnnnnnnnnnnnnnnnnnnnnnnnnnnnnnnnnnnnnnnnnnnnnnnnnnnnnnnnnnnnnnnnnnnnnnnnnnnnnnnnnnnnnnnnnnnnnnnnnnnnnnnnnnnnnnnnnnnnnnnnnnnnnnnnnnnnnnnnnnnnnnnnnnnnnnnnnnnnnnnnnnnnnnnnnnnnnnnnnnnnnnnnnnnnnnnnnnnnnnnnnnnnnnnnnnnnnnnnnnnnnnnnnnnnnnnnnnnnnnnnnnnnnnnnnnnnnnnnnnnnnnnnnnnnnnnnnnnnnnnnnnnnnnnnnnnnnnnnnnnnnnnnnnnnnnnnnnnnnnnnnnnnnnnnnnnnnnnnnnnnnnnnnnnnnnnnnnnnnnnnnnnnnnnnnnnnnnnnnnnnnnnnnnnnnnnnnnnnnnnnnnnnnnnnnnnnnnnnnnnnnnnnnnnnnnnnnnnnnnnnnnnnnnnnnnnnnnnnnnnnnnnnnnnnnnnnnnnnnnnnnnnnnnnnnnnnnnnnnnnnnnnnnnnnnnnnnnnnnnnnnnnnnnnnnnnnnnnnnnnnnnnnnnnnnnnnnnnnnnnnnnnnnnnnnnnnnnnnnnnnnnnnnnnnnnnnnnnnnnnnnnnnnnnnnnnnnnnnnnnnnnnnnnnnnnnnnnnnnnnnnnnnnnnnnnnnnnnnnnnnnnnnnnnnnnnnnnnnnnnnnnnnnnnnnnnnnnnnnnnnnnnnnnnnnnnnnnnnnnnnnnnnnnnnnnnnnnnnnnnnnnnnnnnnnnnnnnnnnnnnnnnnnnnnnnnnnnnnnnnnnnnnnnnnnnnnnnnnnnnnnnnnnnnnnnnnnnnnnnnnnnnnnnnnnnnnnnnnnnnnnnnnnnnnnnnnnnnnnnnnnnnnnnnnnnnnnnnnnnnnnnnnnnnnnnnnnnnnnnnnnnnnnnnnnnnnnnnnnnnnnnnnnnnnnnnnnnnnnnnnnnnnnnnnnnnnnnnnnnnnnnnnnnnnnnnnnnnnnnnnnnnnnnnnnnnnnnnnnnnnnnnnnnnnnnnnnnnnnnnnnnnnnnnnnnnnnnnnnnnnnnnnnnnnnnnnnnnnnnnnnnnnnnnnnnnnnnnnnnnnnnnnnnnnnnnnnnnnnnnnnnnnnnnnnnnnnnnnnnnnnnnnnnnnnnnnnnnnnnnnnnnnnnnnnnnnnnnnnnnnnnnnnnnnnnnnnnnnnnnnnnnnnnnnnnnnnnnnnnnnnnnnnnnnnnnnnnnnnnnnnnnnnnnnnnnnnnnnnnnnnnnnnnnnnnnnnnnnnnnnnnnnnnnnnnnnnnnnnnnnnnnnnnnnnnnnnnnnnnnnnnnnnnnnnnnnnnnnnnnnnnnnnnnnnnnnnnnnnnnnnnnnnnnnnnnnnnnnnnnnnnnnnnnnnnnnnnnnnnnnnnnnnnnnnnnnnnnnnnnnnnnnnnnnnnnnnnnnnnnnnnnnnnnnnnnnnnnnnnnnnnnnnnnnnnnnnnnnnnnnnnnnnnnnnnnnnnnnnnnnnnnnnnnnnnnnnnnnnnnnnnnnnnnnnnnnnnnnnnnnnnnnnnnnnnnnnnnnnnnnnnnnnnnnnnnnnnnnnnnnnnnnnnnnnnnnnnnnnnnnnnnnnnnnnnnnnnnnnnnnnnnnnnnnnnnnnnnnnnnnnnnnnnnnnnnnnnnnnnnnnnnnnnnnnnnnnnnnnnnnnnnnnnnnnnnnnnnnnnnnnnnnnnnnnnnnnnnnnnnnnnnnnnnnnnnnnnnnnnnnnnnnnnnnnnnnnnnnnnnnnnnnnnnnnnnnnnnnnnnnnnnnnnnnnnnnnnnnnnnnnnnnnnnnnnnnnnnnnnnnnnnnnnnnnnnnnnnnnnnnnnnnnnnnnnnnnnnnnnnnnnnnnnnnnnnnnnnnnnnnnnnnnnnnnnnnnnnnnnnnnnnnnnnnnnnnnnnnnnnnnnnnnnnnnnnnnnnnnnnnnnnnnnnnnnnnnnnnnnnnnnnnnnnnnnnnnnnnnnnnnnnnnnnnnnnnnnnnnnnnnnnnnnnnnnnnnnnnnnnnnnnnnnnnnnnnnnnnnnnnnnnnnnnnnnnnnnnnnnnnnnnnnnnnnnnnnnnnnnnnnnnnnnnnnnnnnnnnnnnnnnnnnnnnnnnnnnnnnnnnnnnnnnnnnnnnnnnnnnnnnnnnnnnnnnnnnnnnnnnnnnnnnnnnnnnnnnnnnnnnnnnnnnnnnnnnnnnnnnnnnnnnnnnnnnnnnnnnnnnnnnnnnnnnnnnnnnnnnnnnnnnnnnnnnnnnnnnnnnnnnnnnnnnnnnnnnnnnnnnnnnnnnnnnnnnnnnnnnnnnnnnnnnnnnnnnnnnnnnnnnnnnnnnnnnnnnnnnnnnnnnnnnnnnnnnnnnnnnnnnnnnnnnnnnnnnnnnnnnnnnnnnnnnnnnnnnnnnnnnnnnnnnnnnnnnnnnnnnnnnnnnnnnnnnnnnnnnnnnnnnnnnnnnnnnnnnnnnnnnnnnnnnnnnnnnnnnnnnnnnnnnnnnnnnnnnnnnnnnnnnnnnnnnnnnnnnnnnnnnnnnnnnnnnnnnnnnnnnnnnnnnnnnnnnnnnnnnnnnnnnnnnnnnnnnnnnnnnnnnnnnnnnnnnnnnnnnnnnnnnnnnnnnnnnnnnnnnnnnnnnnnnnnnnnnnnnnnnnnnnnnnnnnnnnnnnnnnnnnnnnnnnnnnnnnnnnnnnnnnnnnnnnnnnnnnnnnnnnnnnnnnnnnnnnnnnnnnnnnnnnnnnnnnnnnnnnnnnnnnnnnnnnnnnnnnnnnnnnnnnnnnnnnnnnnnnnnnnnnnnnnnnnnnnnnnnnnnnnnnnnnnnnnnnnnnnnnnnnnnnnnnnnnnnnnnnnnnnnnnnnnnnnnnnnnnnnnnnnnnnnnnnnnnnnnnnnnnnnnnnnnnnnnnnnnnnnnnnnnnnnnnnnnnnnnnnnnnnnnnnnnnnnnnnnnnnnnnnnnnnnnnnnnnnnnnnnnnnnnnnnnnnnnnnnnnnnnnnnnnnnnnnnnnnnnnnnnnnnnnnnnnnnnnnnnnnnnnnnnnnnnnnnnnnnnnnnnnnnnnnnnnnnnnnnnnnnnnnnnnnnnnnnnnnnnnnnnnnnnnnnnnnnnnnnnnnnnnnnnnnnnnnnnnnnnnnnnnnnnnnnnnnnnnnnnnnnnnnnnnnnnnnnnnnnnnnnnnnnnnnnnnnnnnnnnnnnnnnnnnnnnnnnnnnnnnnnnnnnnnnnnnnnnnnnnnnnnnnnnnnnnnnnnnnnnnnnnnnnnnnnnnnnnnnnnnnnnnnnnnnnnnnnnnnnnnnnnnnnnnnnnnnnnnnnnnnnnnnnnnnnnnnnnnnnnnnnnnnnnnnnnnnnnnnnnnnnnnnnnnnnnnnnnnnnnnnnnnnnnnnnnnnnnnnnnnnnnnnnnnnnnnnnnnnnnnnnnnnnnnnnnnnnnnnnnnnnnnnnnnnnnnnnnnnnnnnnnnnnnnnnnnnnnnnnnnnnnnnnnnnnnnnnnnnnnnnnnnnnnnnnnnnnnnnnnnnnnnnnnnnnnnnnnnnnnnnnnnnnnnnnnnnnnnnnnnnnnnnnnnnnnnnnnnnnnnnnnnnnnnnnnnnnnnnnnnnnnnnnnnnnnnnnnnnnnnnnnnnnnnnnnnnnnnnnnnnnnnnnnnnnnnnnnnnnnnnnnnnnnnnnnnnnnnnnnnnnnnnnnnnnnnnnnnnnnnnnnnnnnnnnnnnnnnnnnnnnnnnnnnnnnnnnnnnnnnnnnnnnnnnnnnnnnnnnnnnnnnnnnnnnnnnnnnnnnnnnnnnnnnnnnnnnnnnnnnnnnnnnnnnnnnnnnnnnnnnnnnnnnnnnnnnnnnnnnnnnnnnnnnnnnnnnnnnnnnnnnnnnnnnnnnnnnnnnnnnnnnnnnnnnnnnnnnnnnnnnnnnnnnnnnnnnnnnnnnnnnnnnnnnnnnnnnnnnnnnnnnnnnnnnnnnnnnnnnnnnnnnnnnnnnnnnnnnnnnnnnnnnnnnnnnnnnnnnnnnnnnnnnnnnnnnnnnnnnnnnnnnnnnnnnnnnnnnnnnnnnnnnnnnnnnnnnnnnnnnnnnnnnnnnnnnnnnnnnnnnnnnnnnnnnnnnnnnnnnnnnnnnnnnnnnnnnnnnnnnnnnnnnnnnnnnnnnnnnnnnnnnnnnnnnnnnnnnnnnnnnnnnnnnnnnnnnnnnnnnnnnnnnnnnnnnnnnnnnnnnnnnnnnnnnnnnnnnnnnnnnnnnnnnnnnnnnnnnnnnnnnnnnnnnnnnnnnnnnnnnnnnnnnnnnnnnnnnnnnnnnnnnnnnnnnnnnnnnnnnnnnnnnnnnnnnnnnnnnnnnnnnnnnnnnnnnnnnnnnnnnnnnnnnnnnnnnnnnnnnnnnnnnnnnnnnnnnnnnnnnnnnnnnnnnnnnnnnnnnnnnnnnnnnnnnnnnnnnnnnnnnnnnnnnnnnnnnnnnnnnnnnnnnnnnnnnnnnnnnnnnnnnnnnnnnnnnnnnnnnnnnnnnnnnnnnnnnnnnnnnnnnnnnnnnnnnnnnnnnnnnnnnnnnnnnnnnnnnnnnnnnnnnnnnnnnnnnnnnnnnnnnnnnnnnnnnnnnnnnnnnnnnnnnnnnnnnnnnnnnnnnnnnnnnnnnnnnnnnnnnnnnnnnnnnnnnnnnnnnnnnnnnnnnnnnnnnnnnnnnnnnnnnnnnnnnnnnnnnnnnnnnnnnnnnnnnnnnnnnnnnnnnnnnnnnnnnnnnnnnnnnnnnnnnnnnnnnnnnnnnnnnnnnnnnnnnnnnnnnnnnnnnnnnnnnnnnnnnnnnnnnnnnnnnnnnnnnnnnnnnnnnnnnnnnnnnnnnnnnnnnnnnnnnnnnnnnnnnnnnnnnnnnnnnnnnnnnnnnnnnnnnnnnnnnnnnnnnnnnnnnnnnnnnnnnnnnnnnnnnnnnnnnnnnnnnnnnnnnnnnnnnnnnnnnnnnnnnnnnnnnnnnnnnnnnnnnnnnnnnnnnnnnnnnnnnnnnnnnnnnnnnnnnnnnnnnnnnnnnnnnnnnnnnnnnnnnnnnnnnnnnnnnnnnnnnnnnnnnnnnnnnnnnnnnnnnnnnnnnnnnnnnnnnnnnnnnnnnnnnnnnnnnnnnnnnnnnnnnnnnnnnnnnnnnnnnnnnnnnnnnnnnnnnnnnnnnnnnnnnnnnnnnnnnnnnnnnnnnnnnnnnnnnnnnnnnnnnnnnnnnnnnnnnnnnnnnnnnnnnnnnnnnnnnnnnnnnnnnnnnnnnnnnnnnnnnnnnnnnnnnnnnnnnnnnnnnnnnnnnnnnnnnnnnnnnnnnnnnnnnnnnnnnnnnnnnnnnnnnnnnnnnnnnnnnnnnnnnnnnnnnnnnnnnnnnnnnnnnnnnnnnnnnnnnnnnnnnnnnnnnnnnnnnnnnnnnnnnnnnnnnnnnnnnnnnnnnnnnnnnnnnnnnnnnnnnnnnnnnnnnnnnnnnnnnnnnnnnnnnnnnnnnnnnnnnnnnnnnnnnnnnnnnnnnnnnnnnnnnnnnnnnnnnnnnnnnnnnnnnnnnnnnnnnnnnnnnnnnnnnnnnnnnnnnnnnnnnnnnnnnnnnnnnnnnnnnnnnnnnnnnnnnnnnnnnnnnnnnnnnnnnnnnnnnnnnnnnnnnnnnnnnnnnnnnnnnnnnnnnnnnnnnnnnnnnnnnnnnnnnnnnnnnnnnnnnnnnnnnnnnnnnnnnnnnnnnnnnnnnnnnnnnnnnnnnnnnnnnnnnnnnnnnnnnnnnnnnnnnnnnnnnnnnnnnnnnnnnnnnnnnnnnnnnnnnnnnnnnnnnnnnnnnnnnnnnnnnnnnnnnnnnnnnnnnnnnnnnnnnnnnnnnnnnnnnnnnnnnnnnnnnnnnnnnnnnnnnnnnnnnnnnnnnnnnnnnnnnnnnnnnnnnnnnnnnnnnnnnnnnnnnnnnnnnnnnnnnnnnnnnnnnnnnnnnnnnnnnnnnnnnnnnnnnnnnnnnnnnnnnnnnnnnnnnnnnnnnnnnnnnnnnnnnnnnnnnnnnnnnnnnnnnnnnnnnnnnnnnnnnnnnnnnnnnnnnnnnnnnnnnnnnnnnnnnnnnnnnnnnnnnnnnnnnnnnnnnnnnnnnnnnnnnnnnnnnnnnnnnnnnnnnnnnnnnnnnnnnnnnnnnnnnnnnnnnnnnnnnnnnnnnnnnnnnnnnnnnnnnnnnnnnnnnnnnnnnnnnnnnnnnnnnnnnnnnnnnnnnnnnnnnnnnnnnnnnnnnnnnnnnnnnnnnnnnnnnnnnnnnnnnnnnnnnnnnnnnnnnnnnnnnnnnnnnnnnnnnnnnnnnnnnnnnnnnnnnnnnnnnnnnnnnnnnnnnnnnnnnnnnnnnnnnnnnnnnnnnnnnnnnnnnnnnnnnnnnnnnnnnnnnnnnnnnnnnnnnnnnnnnnnnnnnnnnnnnnnnnnnnnnnnnnnnnnnnnnnnnnnnnnnnnnnnnnnnnnnnnnnnnnnnnnnnnnnnnnnnnnnnnnnnnnnnnnnnnnnnnnnnnnnnnnnnnnnnnnnnnnnnnnnnnnnnnnnnnnnnnnnnnnnnnnnnnnnnnnnnnnnnnnnnnnnnnnnnnnnnnnnnnnnnnnnnnnnnnnnnnnnnnnnnnnnnnnnnnnnnnnnnnnnnnnnnnnnnnnnnnnnnnnnnnnnnnnnnnnnnnnnnnnnnnnnnnnnnnnnnnnnnnnnnnnnnnnnnnnnnnnnnnnnnnnnnnnnnnnnnnnnnnnnnnnnnnnnnnnnnnnnnnnnnnnnnnnnnnnnnnnnnnnnnnnnnnnnnnnnnnnnnnnnnnnnnnnnnnnnnnnnnnnnnnnnnnnnnnnnnnnnnnnnnnnnnnnnnnnnnnnnnnnnnnnnnnnnnnnnnnnnnnnnnnnnnnnnnnnnnnnnnnnnnnnnnnnnnnnnnnnnnnnnnnnnnnnnnnnnnnnnnnnnnnnnnnnnnnnnnnnnnnnnnnnnnnnnnnnnnnnnnnnnnnnnnnnnnnnnnnnnnnnnnnnnnnnnnnnnnnnnnnnnnnnnnnnnnnnnnnnnnnnnnnnnnnnnnnnnnnnnnnnnnnnnnnnnnnnnnnnnnnnnnnnnnnnnnnnnnnnnnnnnnnnnnnnnnnnnnnnnnnnnnnnnnnnnnnnnnnnnnnnnnnnnnnnnnnnnnnnnnnnnnnnnnnnnnnnnnnnnnnnnnnnnnnnnnnnnnnnnnnnnnnnnnnnnnnnnnnnnnnnnnnnnnnnnnnnnnnnnnnnnnnnnnnnnnnnnnnnnnnnnnnnnnnnnnnnnnnnnnnnnnnnnnnnnnnnnnnnnnnnnnnnnnnnnnnnnnnnnnnnnnnnnnnnnnnnnnnnnnnnnnnnnnnnnnnnnnnnnnnnnnnnnnnnnnnnnnnnnnnnnnnnnnnnnnnnnnnnnnnnnnnnnnnnnnnnnnnnnnnnnnnnnnnnnnnnnnnnnnnnnnnnnnnnnnnnnnnnnnnnnnnnnnnnnnnnnnnnnnnnnnnnnnnnnnnnnnnnnnnnnnnnnnnnnnnnnnnnnnnnnnnnnnnnnnnnnnnnnnnnnnnnnnnnnnnnnnnnnnnnnnnnnnnnnnnnnnnnnnnnnnnnnnnnnnnnnnnnnnnnnnnnnnnnnnnnnnnnnnnnnnnnnnnnnnnnnnnnnnnnnnnnnnnnnnnnnnnnnnnnnnnnnnnnnnnnnnnnnnnnnnnnnnnnnnnnnnnnnnnnnnnnnnnnnnnnnnnnnnnnnnnnnnnnnnnnnnnnnnnnnnnnnnnnnnnnnnnnnnnnnnnnnnnnnnnnnnnnnnnnnnnnnnnnnnnnnnnnnnnnnnnnnnnnnnnnnnnnnnnnnnnnnnnnnnnnnnnnnnnnnnnnnnnnnnnnnnnnnnnnnnnnnnnnnnnnnnnnnnnnnnnnnnnnnnnnnnnnnnnnnnnnnnnnnnnnnnnnnnnnnnnnnnnnnnnnnnnnnnnnnnnnnnnnnnnnnnnnnnnnnnnnnnnnnnnnnnnnnnnnnnnnnnnnnnnnnnnnnnnnnnnnnnnnnnnnnnnnnnnnnnnnnnnnnnnnnnnnnnnnnnnnnnnnnnnnnnnnnnnnnnnnnnnnnnnnnnnnnnnnnnnnnnnnnnnnnnnnnnnnnnnnnnnnnnnnnnnnnnnnnnnnnnnnnnnnnnnnnnnnnnnnnnnnnnnnnnnnnnnnnnnnnnnnnnnnnnnnnnnnnnnnnnnnnnnnnnnnnnnnnnnnnnnnnnnnnnnnnnnnnnnnnnnnnnnnnnnnnnnnnnnnnnnnnnnnnnnnnnnnnnnnnnnnnnnnnnnnnnnnnnnnnnnnnnnnnnnnnnnnnnnnnnnnnnnnnnnnnnnnnnnnnnnnnnnnnnnnnnnnnnnnnnnnnnnnnnnnnnnnnnnnnnnnnnnnnnnnnnnnnnnnnnnnnnnnnnnnnnnnnnnnnnnnnnnnnnnnnnnnnnnnnnnnnnnnnnnnnnnnnnnnnnnnnnnnnnnnnnnnnnnnnnnnnnnnnnnnnnnnnnnnnnnnnnnnnnnnnnnnnnnnnnnnnnnnnnnnnnnnnnnnnnnnnnnnnnnnnnnnnnnnnnnnnnnnnnnnnnnnnnnnnnnnnnnnnnnnnnnnnnnnnnnnnnnnnnnnnnnnnnnnnnnnnnnnnnnnnnnnnnnnnnnnnnnnnnnnnnnnnnnnnnnnnnnnnnnnnnnnnnnnnnnnnnnnnnnnnnnnnnnnnnnnnnnnnnnnnnnnnnnnnnnnnnnnnnnnnnnnnnnnnnnnnnnnnnnnnnnnnnnnnnnnnnnnnnnnnnnnnnnnnnnnnnnnnnnnnnnnnnnnnnnnnnnnnnnnnnnnnnnnnnnnnnnnnnnnnnnnnnnnnnnnnnnnnnnnnnnnnnnnnnnnnnnnnnnnnnnnnnnnnnnnnnnnnnnnnnnnnnnnnnnnnnnnnnnnnnnnnnnnnnnnnnnnnnnnnnnnnnnnnnnnnnnnnnnnnnnnnnnnnnnnnnnnnnnnnnnnnnnnnnnnnnnnnnnnnnnnnnnnnnnnnnnnnnnnnnnnnnnnnnnnnnnnnnnnnnnnnnnnnnnnnnnnnnnnnnnnnnnnnnnnnnnnnnnnnnnnnnnnnnnnnnnnnnnnnnnnnnnnnnnnnnnnnnnnnnnnnnnnnnnnnnnnnnnnnnnnnnnnnnnnnnnnnnnnnnnnnnnnnnnnnnnnnnnnnnnnnnnnnnnnnnnnnnnnnnnnnnnnnnnnnnnnnnnnnnnnnnnnnnnnnnnnnnnnnnnnnnnnnnnnnnnnnnnnnnnnnnnnnnnnnnnnnnnnnnnnnnnnnnnnnnnnnnnnnnnnnnnnnnnnnnnnnnnnnnnnnnnnnnnnnnnnnnnnnnnnnnnnnnnnnnnnnnnnnnnnnnnnnnnnnnnnnnnnnnnnnnnnnnnnnnnnnnnnnnnnnnnnnnnnnnnnnnnnnnnnnnnnnnnnnnnnnnnnnnnnnnnnnnnnnnnnnnnnnnnnnnnnnnnnnnnnnnnnnnnnnnnnnnnnnnnnnnnnnnnnnnnnnnnnnnnnnnnnnnnnnnnnnnnnnnnnnnnnnnnnnnnnnnnnnnnnnnnnnnnnnnnnnnnnnnnnnnnnnnnnnnnnnnnnnnnnnnnnnnnnnnnnnnnnnnnnnnnnnnnnnnnnnnnnnnnnnnnnnnnnnnnnnnnnnnnnnnnnnnnnnnnnnnnnnnnnnnnnnnnnnnnnnnnnnnnnnnnnnnnnnnnnnnnnnnnnnnnnnnnnnnnnnnnnnnnnnnnnnnnnnnnnnnnnnnnnnnnnnnnnnnnnnnnnnnnnnnnnnnnnnnnnnnnnnnnnnnnnnnnnnnnnnnnnnnnnnnnnnnnnnnnnnnnnnnnnnnnnnnnnnnnnnnnnnnnnnnnnnnnnnnnnnnnnnnnnnnnnnnnnnnnnnnnnnnnnnnnnnnnnnnnnnnnnnnnnnnnnnnnnnnnnnnnnnnnnnnnnnnnnnnnnnnnnnnnnnnnnnnnnnnnnnnnnnnnnnnnnnnnnnnnnnnnnnnnnnnnnnnnnnnnnnnnnnnnnnnnnnnnnnnnnnnnnnnnnnnnnnnnnnnnnnnnnnnnnnnnnnnnnnnnnnnnnnnnnnnnnnnnnnnnnnnnnnnnnnnnnnnnnnnnnnnnnnnnnnnnnnnnnnnnnnnnnnnnnnnnnnnnnnnnnnnnnnnnnnnnnnnnnnnnnnnnnnnnnnnnnnnnnnnnnnnnnnnnnnnnnnnnnnnnnnnnnnnnnnnnnnnnnnnnnnnnnnnnnnnnnnnnnnnnnnnnnnnnnnnnnnnnnnnnnnnnnnnnnnnnnnnnnnnnnnnnnnnnnnnnnnnnnnnnnnnnnnnnnnnnnnnnnnnnnnnnnnnnnnnnnnnnnnnnnnnnnnnnnnnnnnnnnnnnnnnnnnnnnnnnnnnnnnnnnnnnnnnnnnnnnnnnnnnnnnnnnnnnnnnnnnnnnnnnnnnnnnnnnnnnnnnnnnnnnnnnnnnnnnnnnnnnnnnnnnnnnnnnnnnnnnnnnnnnnnnnnnnnnnnnnnnnnnnnnnnnnnnnnnnnnnnnnnnnnnnnnnnnnnnnnnnnnnnnnnnnnnnnnnnnnnnnnnnnnnnnnnnnnnnnnnnnnnnnnnnnnnnnnnnnnnnnnnnnnnnnnnnnnnnnnnnnnnnnnnnnnnnnnnnnnnnnnnnnnnnnnnnnnnnnnnnnnnnnnnnnnnnnnnnnnnnnnnnnnnnnnnnnnnnnnnnnnnnnnnnnnnnnnnnnnnnnnnnnnnnnnnnnnnnnnnnnnnnnnnnnnnnnnnnnnnnnnnnnnnnnnnnnnnnnnnnnnnnnnnnnnnnnnnnnnnnnnnnnnnnnnnnnnnnnnnnnnnnnnnnnnnnnnnnnnnnnnnnnnnnnnnnnnnnnnnnnnnnnnnnnnnnnnnnnnnnnnnnnnnnnnnnnnnnnnnnnnnnnnnnnnnnnnnnnnnnnnnnnnnnnnnnnnnnnnnnnnnnnnnnnnnnnnnnnnnnnnnnnnnnnnnnnnnnnnnnnnnnnnnnnnnnnnnnnnnnnnnnnnnnnnnnnnnnnnnnnnnnnnnnnnnnnnnnnnnnnnnnnnnnnnnnnnnnnnnnnnnnnnnnnnnnnnnnnnnnnnnnnnnnnnnnnnnnnnnnnnnnnnnnnnnnnnnnnnnnnnnnnnnnnnnnnnnnnnnnnnnnnnnnnnnnnnnnnnnnnnnnnnnnnnnnnnnnnnnnnnnnnnnnnnnnnnnnnnnnnnnnnnnnnnnnnnnnnnnnnnnnnnnnnnnnnnnnnnnnnnnnnnnnnnnnnnnnnnnnnnnnnnnnnnnnnnnnnnnnnnnnnnnnnnnnnnnnnnnnnnnnnnnnnnnnnnnnnnnnnnnnnnnnnnnnnnnnnnnnnnnnnnnnnnnnnnnnnnnnnnnnnnnnnnnnnnnnnnnnnnnnnnnnnnnnnnnnnnnnnnnnnnnnnnnnnnnnnnnnnnnnnnnnnnnnnnnnnnnnnnnnnnnnnnnnnnnnnnnnnnnnnnnnnnnnnnnnnnnnnnnnnnnnnnnnnnnnnnnnnnnnnnnnnnnnnnnnnnnnnnnnnnnnnnnnnnnnnnnnnnnnnnnnnnnnnnnnnnnnnnnnnnnnnnnnnnnnnnnnnnnnnnnnnnnnnnnnnnnnnnnnnnnnnnnnnnnnnnnnnnnnnnnnnnnnnnnnnnnnnnnnnnnnnnnnnnnnnnnnnnnnnnnnnnnnnnnnnnnnnnnnnnnnnnnnnnnnnnnnnnnnnnnnnnnnnnnnnnnnnnnnnnnnnnnnnnnnnnnnnnnnnnnnnnnnnnnnnnnnnnnnnnnnnnnnnnnnnnnnnnnnnnnnnnnnnnnnnnnnnnnnnnnnnnnnnnnnnnnnnnnnnnnnnnnnnnnnnnnnnnnnnnnnnnnnnnnnnnnnnnnnnnnnnnnnnnnnnnnnnnnnnnnnnnnnnnnnnnnnnnnnnnnnnnnnnnnnnnnnnnnnnnnnnnnnnnnnnnnnnnnnnnnnnnnnnnnnnnnnnnnnnnnnnnnnnnnnnnnnnnnnnnnnnnnnnnnnnnnnnnnnnnnnnnnnnnnnnnnnnnnnnnnnnnnnnnnnnnnnnnnnnnnnnnnnnnnnnnnnnnnnnnnnnnnnnnnnnnnnnnnnnnnnnnnnnnnnnnnnnnnnnnnnnnnnnnnnnnnnnnnnnnnnnnnnnnnnnnnnnnnnnnnnnnnnnnnnnnnnnnnnnnnnnnnnnnnnnnnnnnnnnnnnnnnnnnnnnnnnnnnnnnnnnnnnnnnnnnnnnnnnnnnnnnnnnnnnnnnnnnnnnnnnnnnnnnnnnnnnnnnnnnnnnnnnnnnnnnnnnnnnnnnnnnnnnnnnnnnnnnnnnnnnnnnnnnnnnnnnnnnnnnnnnnnnnnnnnnnnnnnnnnnnnnnnnnnnnnnnnnnnnnnnnnnnnnnnnnnnnnnnnnnnnnnnnnnnnnnnnnnnnnnnnnnnnnnnnnnnnnnnnnnnnnnnnnnnnnnnnnnnnnnnnnnnnnnnnnnnnnnnnnnnnnnnnnnnnnnnnnnnnnnnnnnnnnnnnnnnnnnnnnnnnnnnnnnnnnnnnnnnnnnnnnnnnnnnnnnnnnnnnnnnnnnnnnnnnnnnnnnnnnnnnnnnnnnnnnnnnnnnnnnnnnnnnnnnnnnnnnnnnnnnnnnnnnnnnnnnnnnnnnnnnnnnnnnnnnnnnnnnnnnnnnnnnnnnnnnnnnnnnnnnnnnnnnnnnnnnnnnnnnnnnnnnnnnnnnnnnnnnnnnnnnnnnnnnnnnnnnnnnnnnnnnnnnnnnnnnnnnnnnnnnnnnnnnnnnnnnnnnnnnnnnnnnnnnnnnnnnnnnnnnnnnnnnnnnnnnnnnnnnnnnnnnnnnnnnnnnnnnnnnnnnnnnnnnnnnnnnnnnnnnnnnnnnnnnnnnnnnnnnnnnnnnnnnnnnnnnnnnnnnnnnnnnnnnnnnnnnnnnnnnnnnnnnnnnnnnnnnnnnnnnnnnnnnnnnnnnnnnnnnnnnnnnnnnnnnnnnnnnnnnnnnnnnnnnnnnnnnnnnnnnnnnnnnnnnnnnnnnnnnnnnnnnnnnnnnnnnnnnnnnnnnnnnnnnnnnnnnnnnnnnnnnnnnnnnnnnnnnnnnnnnnnnnnnnnnnnnnnnnnnnnnnnnnnnnnnnnnnnnnnnnnnnnnnnnnnnnnnnnnnnnnnnnnnnnnnnnnnnnnnnnnnnnnnnnnnnnnnnnnnnnnnnnnnnnnnnnnnnnnnnnnnnnnnnnnnnnnnnnnnnnnnnnnnnnnnnnnnnnnnnnnnnnnnnnnnnnnnnnnnnnnnnnnnnnnnnnnnnnnnnnnnnnnnnnnnnnnnnnnnnnnnnnnnnnnnnnnnnnnnnnnnnnnnnnnnnnnnnnnnnnnnnnnnnnnnnnnnnnnnnnnnnnnnnnnnnnnnnnnnnnnnnnnnnnnnnnnnnnnnnnnnnnnnnnnnnnnnnnnnnnnnnnnnnnnnnnnnnnnnnnnnnnnnnnnnnnnnnnnnnnnnnnnnnnnnnnnnnnnnnnnnnnnnnnnnnnnnnnnnnnnnnnnnnnnnnnnnnnnnnnnnnnnnnnnnnnnnnnnnnnnnnnnnnnnnnnnnnnnnnnnnnnnnnnnnnnnnnnnnnnnnnnnnnnnnnnnnnnnnnnnnnnnnnnnnnnnnnnnnnnnnnnnnnnnnnnnnnnnnnnnnnnnnnnnnnnnnnnnnnnnnnnnnnnnnnnnnnnnnnnnnnnnnnnnnnnnnnnnnnnnnnnnnnnnnnnnnnnnnnnnnnnnnnnnnnnnnnnnnnnnnnnnnnnnnnnnnnnnnnnnnnnnnnnnnnnnnnnnnnnnnnnnnnnnnnnnnnnnnnnnnnnnnnnnnnnnnnnnnnnnnnnnnnnnnnnnnnnnnnnnnnnnnnnnnnnnnnnnnnnnnnnnnnnnnnnnnnnnnnnnnnnnnnnnnnnnnnnnnnnnnnnnnnnnnnnnnnnnnnnnnnnnnnnnnnnnnnnnnnnnnnnnnnnnnnnnnnnnnnnnnnnnnnnnnnnnnnnnnnnnnnnnnnnnnnnnnnnnnnnnnnnnnnnnnnnnnnnnnnnnnnnnnnnnnnnnnnnnnnnnnnnnnnnnnnnnnnnnnnnnnnnnnnnnnnnnnnnnnnnnnnnnnnnnnnnnnnnnnnnnnnnnnnnnnnnnnnnnnnnnnnnnnnnnnnnnnnnnnnnnnnnnnnnnnnnnnnnnnnnnnnnnnnnnnnnnnnnnnnnnnnnnnnnnnnnnnnnnnnnnnnnnnnnnnnnnnnnnnnnnnnnnnnnnnnnnnnnnnnnnnnnnnnnnnnnnnnnnnnnnnnnnnnnnnnnnnnnnnnnnnnnnnnnnnnnnnnnnnnnnnnnnnnnnnnnnnnnnnnnnnnnnnnnnnnnnnnnnnnnnnnnnnnnnnnnnnnnnnnnnnnnnnnnnnnnnnnnnnnnnnnnnnnnnnnnnnnnnnnnnnnnnnnnnnnnnnnnnnnnnnnnnnnnnnnnnnnnnnnnnnnnnnnnnnnnnnnnnnnnnnnnnnnnnnnnnnnnnnnnnnnnnnnnnnnnnnnnnnnnnnnnnnnnnnnnnnnnnnnnnnnnnnnnnnnnnnnnnnnnnnnnnnnnnnnnnnnnnnnnnnnnnnnnnnnnnnnnnnnnnnnnnnnnnnnnnnnnnnnnnnnnnnnnnnnnnnnnnnnnnnnnnnnnnnnnnnnnnnnnnnnnnnnnnnnnnnnnnnnnnnnnnnnnnnnnnnnnnnnnnnnnnnnnnnnnnnnnnnnnnnnnnnnnnnnnnnnnnnnnnnnnnnnnnnnnnnnnnnnnnnnnnnnnnnnnnnnnnnnnnnnnnnnnnnnnnnnnnnnnnnnnnnnnnnnnnnnnnnnnnnnnnnnnnnnnnnnnnnnnnnnnnnnnnnnnnnnnnnnnnnnnnnnnnnnnnnnnnnnnnnnnnnnnnnnnnnnnnnnnnnnnnnnnnnnnnnnnnnnnnnnnnnnnnnnnnnnnnnnnnnnnnnnnnnnnnnnnnnnnnnnnnnnnnnnnnnnnnnnnnnnnnnnnnnnnnnnnnnnnnnnnnnnnnnnnnnnnnnnnnnnnnnnnnnnnnnnnnnnnnnnnnnnnnnnnnnnnnnnnnnnnnnnnnnnnnnnnnnnnnnnnnnnnnnnnnnnnnnnnnnnnnnnnnnnnnnnnnnnnnnnnnnnnnnnnnnnnnnnnnnnnnnnnnnnnnnnnnnnnnnnnnnnnnnnnnnnnnnnnnnnnnnnnnnnnnnnnnnnnnnnnnnnnnnnnnnnnnnnnnnnnnnnnnnnnnnnnnnnnnnnnnnnnnnnnnnnnnnnnnnnnnnnnnnnnnnnnnnnnnnnnnnnnnnnnnnnnnnnnnnnnnnnnnnnnnnnnnnnnnnnnnnnnnnnnnnnnnnnnnnnnnnnnnnnnnnnnnnnnnnnnnnnnnnnnnnnnnnnnnnnnnnnnnnnnnnnnnnnnnnnnnnnnnnnnnnnnnnnnnnnnnnnnnnnnnnnnnnnnnnnnnnnnnnnnnnnnnnnnnnnnnnnnnnnnnnnnnnnnnnnnnnnnnnnnnnnnnnnnnnnnnnnnnnnnnnnnnnnnnnnnnnnnnnnnnnnnnnnnnnnnnnnnnnnnnnnnnnnnnnnnnnnnnnnnnnnnnnnnnnnnnnnnnnnnnnnnnnnnnnnnnnnnnnnnnnnnnnnnnnnnnnnnnnnnnnnnnnnnnnnnnnnnnnnnnnnnnnnnnnnnnnnnnnnnnnnnnnnnnnnnnnnnnnnnnnnnnnnnnnnnnnnnnnnnnnnnnnnnnnnnnnnnnnnnnnnnnnnnnnnnnnnnnnnnnnnnnnnnnnnnnnnnnnnnnnnnnnnnnnnnnnnnnnnnnnnnnnnnnnnnnnnnnnnnnnnnnnnnnnnnnnnnnnnnnnnnnnnnnnnnnnnnnnnnnnnnnnnnnnnnnnnnnnnnnnnnnnnnnnnnnnnnnnnnnnnnnnnnnnnnnnnnnnnnnnnnnnnnnnnnnnnnnnnnnnnnnnnnnnnnnnnnnnnnnnnnnnnnnnnnnnnnnnnnnnnnnnnnnnnnnnnnnnnnnnnnnnnnnnnnnnnnnnnnnnnnnnnnnnnnnnnnnnnnnnnnnnnnnnnnnnnnnnnnnnnnnnnnnnnnnnnnnnnnnnnnnnnnnnnnnnnnnnnnnnnnnnnnnnnnnnnnnnnnnnnnnnnnnnnnnnnnnnnnnnnnnnnnnnnnnnnnnnnnnnnnnnnnnnnnnnnnnnnnnnnnnnnnnnnnnnnnnnnnnnnnnnnnnnnnnnnnnnnnnnnnnnnnnnnnnnnnnnnnnnnnnnnnnnnnnnnnnnnnnnnnnnnnnnnnnnnnnnnnnnnnnnnnnnnnnnnnnnnnnnnnnnnnnnnnnnnnnnnnnnnnnnnnnnnnnnnnnnnnnnnnnnnnnnnnnnnnnnnnnnnnnnnnnnnnnnnnnnnnnnnnnnnnnnnnnnnnnnnnnnnnnnnnnnnnnnnnnnnnnnnnnnnnnnnnnnnnnnnnnnnnnnnnnnnnnnnnnnnnnnnnnnnnnnnnnnnnnnnnnnnnnnnnnnnnnnnnnnnnnnnnnnnnnnnnnnnnnnnnnnnnnnnnnnnnnnnnnnnnnnnnnnnnnnnnnnnnnnnnnnnnnnnnnnnnnnnnnnnnnnnnnnnnnnnnnnnnnnnnnnnnnnnnnnnnnnnnnnnnnnnnnnnnnnnnnnnnnnnnnnnnnnnnnnnnnnnnnnnnnnnnnnnnnnnnnnnnnnnnnnnnnnnnnnnnnnnnnnnnnnnnnnnnnnnnnnnnnnnnnnnnnnnnnnnnnnnnnnnnnnnnnnnnnnnnnnnnnnnnnnnnnnnnnnnnnnnnnnnnnnnnnnnnnnnnnnnnnnnnnnnnnnnnnnnnnnnnnnnnnnnnnnnnnnnnnnnnnnnnnnnnnnnnnnnnnnnnnnnnnnnnnnnnnnnnnnnnnnnnnnnnnnnnnnnnnnnnnnnnnnnnnnnnnnnnnnnnnnnnnnnnnnnnnnnnnnnnnnnnnnnnnnnnnnnnnnnnnnnnnnnnnnnnnnnnnnnnnnnnnnnnnnnnnnnnnnnnnnnnnnnnnnnnnnnnnnnnnnnnnnnnnnnnnnnnnnnnnnnnnnnnnnnnnnnnnnnnnnnnnnnnnnnnnnnnnnnnnnnnnnnnnnnnnnnnnnnnnnnnnnnnnnnnnnnnnnnnnnnnnnnnnnnnnnnnnnnnnnnnnnnnnnnnnnnnnnnnnnnnnnnnnnnnnnnnnnnnnnnnnnnnnnnnnnnnnnnnnnnnnnnnnnnnnnnnnnnnnnnnnnnnnnnnnnnnnnnnnnnnnnnnnnnnnnnnnnnnnnnnnnnnnnnnnnnnnnnnnnnnnnnnnnnnnnnnnnnnnnnnnnnnnnnnnnnnnnnnnnnnnnnnnnnnnnnnnnnnnnnnnnnnnnnnnnnnnnnnnnnnnnnnnnnnnnnnnnnnnnnnnnnnnnnnnnnnnnnnnnnnnnnnnnnnnnnnnnnnnnnnnnnnnnnnnnnnnnnnnnnnnnnnnnnnnnnnnnnnnnnnnnnnnnnnnnnnnnnnnnnnnnnnnnnnnnnnnnnnnnnnnnnnnnnnnnnnnnnnnnnnnnnnnnnnnnnnnnnnnnnnnnnnnnnnnnnnnnnnnnnnnnnnnnnnnnnnnnnnnnnnnnnnnnnnnnnnnnnnnnnnnnnnnnnnnnnnnnnnnnnnnnnnnnnnnnnnnnnnnnnnnnnnnnnnnnnnnnnnnnnnnnnnnnnnnnnnnnnnnnnnnnnnnnnnnnnnnnnnnnnnnnnnnnnnnnnnnnnnnnnnnnnnnnnnnnnnnnnnnnnnnnnnnnnnnnnnnnnnnnnnnnnnnnnnnnnnnnnnnnnnnnnnnnnnnnnnnnnnnnnnnnnnnnnnnnnnnnnnnnnnnnnnnnnnnnnnnnnnnnnnnnnnnnnnnnnnnnnnnnnnnnnnnnnnnnnnnnnnnnnnnnnnnnnnnnnnnnnnnnnnnnnnnnnnnnnnnnnnnnnnnnnnnnnnnnnnnnnnnnnnnnnnnnnnnnnnnnnnnnnnnnnnnnnnnnnnnnnnnnnnnnnnnnnnnnnnnnnnnnnnnnnnnnnnnnnnnnnnnnnnnnnnnnnnnnnnnnnnnnnnnnnnnnnnnnnnnnnnnnnnnnnnnnnnnnnnnnnnnnnnnnnnnnnnnnnnnnnnnnnnnnnnnnnnnnnnnnnnnnnnnnnnnnnnnnnnnnnnnnnnnnnnnnnnnnnnnnnnnnnnnnnnnnnnnnnnnnnnnnnnnnnnnnnnnnnnnnnnnnnnnnnnnnnnnnnnnnnnnnnnnnnnnnnnnnnnnnnnnnnnnnnnnnnnnnnnnnnnnnnnnnnnnnnnnnnnnnnnnnnnnnnnnnnnnnnnnnnnnnnnnnnnnnnnnnnnnnnnnnnnnnnnnnnnnnnnnnnnnnnnnnnnnnnnnnnnnnnnnnnnnnnnnnnnnnnnnnnnnnnnnnnnnnnnnnnnnnnnnnnnnnnnnnnnnnnnnnnnnnnnnnnnnnnnnnnnnnnnnnnnnnnnnnnnnnnnnnnnnnnnnnnnnnnnnnnnnnnnnnnnnnnnnnnnnnnnnnnnnnnnnnnnnnnnnnnnnnnnnnnnnnnnnnnnnnnnnnnnnnnnnnnnnnnnnnnnnnnnnnnnnnnnnnnnnnnnnnnnnnnnnnnnnnnnnnnnnnnnnnnnnnnnnnnnnnnnnnnnnnnnnnnnnnnnnnnnnnnnnnnnnnnnnnnnnnnnnnnnnnnnnnnnnnnnnnnnnnnnnnnnnnnnnnnnnnnnnnnnnnnnnnnnnnnnnnnnnnnnnnnnnnnnnnnnnnnnnnnnnnnnnnnnnnnnnnnnnnnnnnnnnnnnnnnnnnnnnnnnnnnnnnnnnnnnnnnnnnnnnnnnnnnnnnnnnnnnnnnnnnnnnnnnnnnnnnnnnnnnnnnnnnnnnnnnnnnnnnnnnnnnnnnnnnnnnnnnnnnnnnnnnnnnnnnnnnnnnnnnnnnnnnnnnnnnnnnnnnnnnnnnnnnnnnnnnnnnnnnnnnnnnnnnnnnnnnnnnnnnnnnnnnnnnnnnnnnnnnnnnnnnnnnnnnnnnnnnnnnnnnnnnnnnnnnnnnnnnnnnnnnnnnnnnnnnnnnnnnnnnnnnnnnnnnnnnnnnnnnnnnnnnnnnnnnnnnnnnnnnnnnnnnnnnnnnnnnnnnnnnnnnnnnnnnnnnnnnnnnnnnnnnnnnnnnnnnnnnnnnnnnnnnnnnnnnnnnnnnnnnnnnnnnnnnnnnnnnnnnnnnnnnnnnnnnnnnnnnnnnnnnnnnnnnnnnnnnnnnnnnnnnnnnnnnnnnnnnnnnnnnnnnnnnnnnnnnnnnnnnnnnnnnnnnnnnnnnnnnnnnnnnnnnnnnnnnnnnnnnnnnnnnnnnnnnnnnnnnnnnnnnnnnnnnnnnnnnnnnnnnnnnnnnnnnnnnnnnnnnnnnnnnnnnnnnnnnnnnnnnnnnnnnnnnnnnnnnnnnnnnnnnnnnnnnnnnnnnnnnnnnnnnnnnnnnnnnnnnnnnnnnnnnnnnnnnnnnnnnnnnnnnnnnnnnnnnnnnnnnnnnnnnnnnnnnnnnnnnnnnnnnnnnnnnnnnnnnnnnnnnnnnnnnnnnnnnnnnnnnnnnnnnnnnnnnnnnnnnnnnnnnnnnnnnnnnnnnnnnnnnnnnnnnnnnnnnnnnnnnnnnnnnnnnnnnnnnnnnnnnnnnnnnnnnnnnnnnnnnnnnnnnnnnnnnnnnnnnnnnnnnnnnnnnnnnnnnnnnnnnnnnnnnnnnnnnnnnnnnnnnnnnnnnnnnnnnnnnnnnnnnnnnnnnnnnnnnnnnnnnnnnnnnnnnnnnnnnnnnnnnnnnnnnnnnnnnnnnnnnnnnnnnnnnnnnnnnnnnnnnnnnnnnnnnnnnnnnnnnnnnnnnnnnnnnnnnnnnnnnnnnnnnnnnnnnnnnnnnnnnnnnnnnnnnnnnnnnnnnnnnnnnnnnnnnnnnnnnnnnnnnnnnnnnnnnnnnnnnnnnnnnnnnnnnnnnnnnnnnnnnnnnnnnnnnnnnnnnnnnnnnnnnnnnnnnnnnnnnnnnnnnnnnnnnnnnnnnnnnnnnnnnnnnnnnnnnnnnnnnnnnnnnnnnnnnnnnnnnnnnnnnnnnnnnnnnnnnnnnnnnnnnnnnnnnnnnnnnnnnnnnnnnnnnnnnnnnnnnnnnnnnnnnnnnnnnnnnnnnnnnnnnnnnnnnnnnnnnnnnnnnnnnnnnnnnnnnnnnnnnnnnnnnnnnnnnnnnnnnnnnnnnnnnnnnnnnnnnnnnnnnnnnnnnnnnnnnnnnnnnnnnnnnnnnnnnnnnnnnnnnnnnnnnnnnnnnnnnnnnnnnnnnnnnnnnnnnnnnnnnnnnnnnnnnnnnnnnnnnnnnnnnnnnnnnnnnnnnnnnnnnnnnnnnnnnnnnnnnnnnnnnnnnnnnnnnnnnnnnnnnnnnnnnnnnnnnnnnnnnnnnnnnnnnnnnnnnnnnnnnnnnnnnnnnnnnnnnnnnnnnnnnnnnnnnnnnnnnnnnnnnnnnnnnnnnnnnnnnnnnnnnnnnnnnnnnnnnnnnnnnnnnnnnnnnnnnnnnnnnnnnnnnnnnnnnnnnnnnnnnnnnnnnnnnnnnnnnnnnnnnnnnnnnnnnnnnnnnnnnnnnnnnnnnnnnnnnnnnnnnnnnnnnnnnnnnnnnnnnnnnnnnnnnnnnnnnnnnnnnnnnnnnnnnnnnnnnnnnnnnnnnnnnnnnnnnnnnnnnnnnnnnnnnnnnnnnnnnnnnnnnnnnnnnnnnnnnnnnnnnnnnnnnnnnnnnnnnnnnnnnnnnnnnnnnnnnnnnnnnnnnnnnnnnnnnnnnnnnnnnnnnnnnnnnnnnnnnnnnnnnnnnnnnnnnnnnnnnnnnnnnnnnnnnnnnnnnnnnnnnnnnnnnnnnnnnnnnnnnnnnnnnnnnnnnnnnnnnnnnnnnnnnnnnnnnnnnnnnnnnnnnnnnnnnnnnnnnnnnnnnnnnnnnnnnnnnnnnnnnnnnnnnnnnnnnnnnnnnnnnnnnnnnnnnnnnnnnnnnnnnnnnnnnnnnnnnnnnnnnnnnnnnnnnnnnnnnnnnnnnnnnnnnnnnnnnnnnnnnnnnnnnnnnnnnnnnnnnnnnnnnnnnnnnnnnnnnnnnnnnnnnnnnnnnnnnnnnnnnnnnnnnnnnnnnnnnnnnnnnnnnnnnnnnnnnnnnnnnnnnnnnnnnnnnnnnnnnnnnnnnnnnnnnnnnnnnnnnnnnnnnnnnnnnnnnnnnnnnnnnnnnnnnnnnnnnnnnnnnnnnnnnnnnnnnnnnnnnnnnnnnnnnnnnnnnnnnnnnnnnnnnnnnnnnnnnnnnnnnnnnnnnnnnnnnnnnnnnnnnnnnnnnnnnnnnnnnnnnnnnnnnnnnnnnnnnnnnnnnnnnnnnnnnnnnnnnnnnnnnnnnnnnnnnnnnnnnnnnnnnnnnnnnnnnnnnnnnnnnnnnnnnnnnnnnnnnnnnnnnnnnnnnnnnnnnnnnnnnnnnnnnnnnnnnnnnnnnnnnnnnnnnnnnnnnnnnnnnnnnnnnnnnnnnnnnnnnnnnnnnnnnnnnnnnnnnnnnnnnnnnnnnnnnnnnnnnnnnnnnnnnnnnnnnnnnnnnnnnnnnnnnnnnnnnnnnnnnnnnnnnnnnnnnnnnnnnnnnnnnnnnnnnnnnnnnnnnnnnnnnnnnnnnnnnnnnnnnnnnnnnnnnnnnnnnnnnnnnnnnnnnnnnnnnnnnnnnnnnnnnnnnnnnnnnnnnnnnnnnnnnnnnnnnnnnnnnnnnnnnnnnnnnnnnnnnnnnnnnnnnnnnnnnnnnnnnnnnnnnnnnnnnnnnnnnnnnnnnnnnnnnnnnnnnnnnnnnnnnnnnnnnnnnnnnnnnnnnnnnnnnnnnnnnnnnnnnnnnnnnnnnnnnnnnnnnnnnnnnnnnnnnnnnnnnnnnnnnnnnnnnnnnnnnnnnnnnnnnnnnnnnnnnnnnnnnnnnnnnnnnnnnnnnnnnnnnnnnnnnnnnnnnnnnnnnnnnnnnnnnnnnnnnnnnnnnnnnnnnnnnnnnnnnnnnnnnnnnnnnnnnnnnnnnnnnnnnnnnnnnnnnnnnnnnnnnnnnnnnnnnnnnnnnnnnnnnnnnnnnnnnnnnnnnnnnnnnnnnnnnnnnnnnnnnnnnnnnnnnnnnnnnnnnnnnnnnnnnnnnnnnnnnnnnnnnnnnnnnnnnnnnnnnnnnnnnnnnnnnnnnnnnnnnnnnnnnnnnnnnnnnnnnnnnnnnnnnnnnnnnnnnnnnnnnnnnnnnnnnnnnnnnnnnnnnnnnnnnnnnnnnnnnnnnnnnnnnnnnnnnnnnnnnnnnnnnnnnnnnnnnnnnnnnnnnnnnnnnnnnnnnnnnnnnnnnnnnnnnnnnnnnnnnnnnnnnnnnnnnnnnnnnnnnnnnnnnnnnnnnnnnnnnnnnnnnnnnnnnnnnnnnnnnnnnnnnnnnnnnnnnnnnnnnnnnnnnnnnnnnnnnnnnnnnnnnnnnnnnnnnnnnnnnnnnnnnnnnnnnnnnnnnnnnnnnnnnnnnnnnnnnnnnnnnnnnnnnnnnnnnnnnnnnnnnnnnnnnnnnnnnnnnnnnnnnnnnnnnnnnnnnnnnnnnnnnnnnnnnnnnnnnnnnnnnnnnnnnnnnnnnnnnnnnnnnnnnnnnnnnnnnnnnnnnnnnnnnnnnnnnnnnnnnnnnnnnnnnnnnnnnnnnnnnnnnnnnnnnnnnnnnnnnnnnnnnnnnnnnnnnnnnnnnnnnnnnnnnnnnnnnnnnnnnnnnnnnnnnnnnnnnnnnnnnnnnnnnnnnnnnnnnnnnnnnnnnnnnnnnnnnnnnnnnnnnnnnnnnnnnnnnnnnnnnnnnnnnnnnnnnnnnnnnnnnnnnnnnnnnnnnnnnnnnnnnnnnnnnnnnnnnnnnnnnnnnnnnnnnnnnnnnnnnnnnnnnnnnnnnnnnnnnnnnnnnnnnnnnnnnnnnnnnnnnnnnnnnnnnnnnnnnnnnnnnnnnnnnnnnnnnnnnnnnnnnnnnnnnnnnnnnnnnnnnnnnnnnnnnnnnnnnnnnnnnnnnnnnnnnnnnnnnnnnnnnnnnnnnnnnnnnnnnnnnnnnnnnnnnnnnnnnnnnnnnnnnnnnnnnnnnnnnnnnnnnnnnnnnnnnnnnnnnnnnnnnnnnnnnnnnnnnnnnnnnnnnnnnnnnnnnnnnnnnnnnnnnnnnnnnnnnnnnnnnnnnnnnnnnnnnnnnnnnnnnnnnnnnnnnnnnnnnnnnnnnnnnnnnnnnnnnnnnnnnnnnnnnnnnnnnnnnnnnnnnnnnnnnnnnnnnnnnnnnnnnnnnnnnnnnnnnnnnnnnnnnnnnnnnnnnnnnnnnnnnnnnnnnnnnnnnnnnnnnnnnnnnnnnnnnnnnnnnnnnnnnnnnnnnnnnnnnnnnnnnnnnnnnnnnnnnnnnnnnnnnnnnnnnnnnnnnnnnnnnnnnnnnnnnnnnnnnnnnnnnnnnnnnnnnnnnnnnnnnnnnnnnnnnnnnnnnnnnnnnnnnnnnnnnnnnnnnnnnnnnnnnnnnnnnnnnnnnnnnnnnnnnnnnnnnnnnnnnnnnnnnnnnnnnnnnnnnnnnnnnnnnnnnnnnnnnnnnnnnnnnnnnnnnnnnnnnnnnnnnnnnnnnnnnnnnnnnnnnnnnnnnnnnnnnnnnnnnnnnnnnnnnnnnnnnnnnnnnnnnnnnnnnnnnnnnnnnnnnnnnnnnnnnnnnnnnnnnnnnnnnnnnnnnnnnnnnnnnnnnnnnnnnnnnnnnnnnnnnnnnnnnnnnnnnnnnnnnnnnnnnnnnnnnnnnnnnnnnnnnnnnnnnnnnnnnnnnnnnnnnnnnnnnnnnnnnnnnnnnnnnnnnnnnnnnnnnnnnnnnnnnnnnnnnnnnnnnnnnnnnnnnnnnnnnnnnnnnnnnnnnnnnnnnnnnnnnnnnnnnnnnnnnnnnnnnnnnnnnnnnnnnnnnnnnnnnnnnnnnnnnnnnnnnnnnnnnnnnnnnnnnnnnnnnnnnnnnnnnnnnnnnnnnnnnnnnnnnnnnnnnnnnnnnnnnnnnnnnnnnnnnnnnnnnnnnnnnnnnnnnnnnnnnnnnnnnnnnnnnnnnnnnnnnnnnnnnnnnnnnnnnnnnnnnnnnnnnnnnnnnnnnnnnnnnnnnnnnnnnnnnnnnnnnnnnnnnnnnnnnnnnnnnnnnnnnnnnnnnnnnnnnnnnnnnnnnnnnnnnnnnnnnnnnnnnnnnnnnnnnnnnnnnnnnnnnnnnnnnnnnnnnnnnnnnnnnnnnnnnnnnnnnnnnnnnnnnnnnnnnnnnnnnnnnnnnnnnnnnnnnnnnnnnnnnnnnnnnnnnnnnnnnnnnnnnnnnnnnnnnnnnnnnnnnnnnnnnnnnnnnnnnnnnnnnnnnnnnnnnnnnnnnnnnnnnnnnnnnnnnnnnnnnnnnnnnnnnnnnnnnnnnnnnnnnnnnnnnnnnnnnnnnnnnnnnnnnnnnnnnnnnnnnnnnnnnnnnnnnnnnnnnnnnnnnnnnnnnnnnnnnnnnnnnnnnnnnnnnnnnnnnnnnnnnnnnnnnnnnnnnnnnnnnnnnnnnnnnnnnnnnnnnnnnnnnnnnnnnnnnnnnnnnnnnnnnnnnnnnnnnnnnnnnnnnnnnnnnnnnnnnnnnnnnnnnnnnnnnnnnnnnnnnnnnnnnnnnnnnnnnnnnnnnnnnnnnnnnnnnnnnnnnnnnnnnnnnnnnnnnnnnnnnnnnnnnnnnnnnnnnnnnnnnnnnnnnnnnnnnnnnnnnnnnnnnnnnnnnnnnnnnnnnnnnnnnnnnnnnnnnnnnnnnnnnnnnnnnnnnnnnnnnnnnnnnnnnnnnnnnnnnnnnnnnnnnnnnnnnnnnnnnnnnnnnnnnnnnnnnnnnnnnnnnnnnnnnnnnnnnnnnnnnnnnnnnnnnnnnnnnnnnnnnnnnnnnnnnnnnnnnnnnnnnnnnnnnnnnnnnnnnnnnnnnnnnnnnnnnnnnnnnnnnnnnnnnnnnnnnnnnnnnnnnnnnnnnnnnnnnnnnnnnnnnnnnnnnnnnnnnnnnnnnnnnnnnnnnnnnnnnnnnnnnnnnnnnnnnnnnnnnnnnnnnnnnnnnnnnnnnnnnnnnnnnnnnnnnnnnnnnnnnnnnnnnnnnnnnnnnnnnnnnnnnnnnnnnnnnnnnnnnnnnnnnnnnnnnnnnnnnnnnnnnnnnnnnnnnnnnnnnnnnnnnnnnnnnnnnnnnnnnnnnnnnnnnnnnnnnnnnnnnnnnnnnnnnnnnnnnnnnnnnnnnnnnnnnnnnnnnnnnnnnnnnnnnnnnnnnnnnnnnnnnnnnnnnnnnnnnnnnnnnnnnnnnnnnnnnnnnnnnnnnnnnnnnnnnnnnnnnnnnnnnnnnnnnnnnnnnnnnnnnnnnnnnnnnnnnnnnnnnnnnnnnnnnnnnnnnnnnnnnnnnnnnnnnnnnnnnnnnnnnnnnnnnnnnnnnnnnnnnnnnnnnnnnnnnnnnnnnnnnnnnnnnnnnnnnnnnnnnnnnnnnnnnnnnnnnnnnnnnnnnnnnnnnnnnnnnnnnnnnnnnnnnnnnnnnnnnnnnnnnnnnnnnnnnnnnnnnnnnnnnnnnnnnnnnnnnnnnnnnnnnnnnnnnnnnnnnnnnnnnnnnnnnnnnnnnnnnnnnnnnnnnnnnnnnnnnnnnnnnnnnnnnnnnnnnnnnnnnnnnnnnnnnnnnnnnnnnnnnnnnnnnnnnnnnnnnnnnnnnnnnnnnnnnnnnnnnnnnnnnnnnnnnnnnnnnnnnnnnnnnnnnnnnnnnnnnnnnnnnnnnnnnnnnnnnnnnnnnnnnnnnnnnnnnnnnnnnnnnnnnnnnnnnnnnnnnnnnnnnnnnnnnnnnnnnnnnnnnnnnnnnnnnnnnnnnnnnnnnnnnnnnnnnnnnnnnnnnnnnnnnnnnnnnnnnnnnnnnnnnnnnnnnnnnnnnnnnnnnnnnnnnnnnnnnnnnnnnnnnnnnnnnnnnnnnnnnnnnnnnnnnnnnnnnnnnnnnnnnnnnnnnnnnnnnnnnnnnnnnnnnnnnnnnnnnnnnnnnnnnnnnnnnnnnnnnnnnnnnnnnnnnnnnnnnnnnnnnnnnnnnnnnnnnnnnnnnnnnnnnnnnnnnnnnnnnnnnnnnnnnnnnnnnnnnnnnnnnnnnnnnnnnnnnnnnnnnnnnnnnnnnnnnnnnnnnnnnnnnnnnnnnnnnnnnnnnnnnnnnnnnnnnnnnnnnnnnnnnnnnnnnnnnnnnnnnnnnnnnnnnnnnnnnnnnnnnnnnnnnnnnnnnnnnnnnnnnnnnnnnnnnnnnnnnnnnnnnnnnnnnnnnnnnnnnnnnnnnnnnnnnnnnnnnnnnnnnnnnnnnnnnnnnnnnnnnnnnnnnnnnnnnnnnnnnnnnnnnnnnnnnnnnnnnnnnnnnnnnnnnnnnnnnnnnnnnnnnnnnnnnnnnnnnnnnnnnnnnnnnnnnnnnnnnnnnnnnnnnnnnnnnnnnnnnnnnnnnnnnnnnnnnnnnnnnnnnnnnnnnnnnnnnnnnnnnnnnnnnnnnnnnnnnnnnnnnnnnnnnnnnnnnnnnnnnnnnnnnnnnnnnnnnnnnnnnnnnnnnnnnnnnnnnnnnnnnnnnnnnnnnnnnnnnnnnnnnnnnnnnnnnnnnnnnnnnnnnnnnnnnnnnnnnnnnnnnnnnnnnnnnnnnnnnnnnnnnnnnnnnnnnnnnnnnnnnnnnnnnnnnnnnnnnnnnnnnnnnnnnnnnnnnnnnnnnnnnnnnnnnnnnnnnnnnnnnnnnnnnnnnnnnnnnnnnnnnnnnnnnnnnnnnnnnnnnnnnnnnnnnnnnnnnnnnnnnnnnnnnnnnnnnnnnnnnnnnnnnnnnnnnnnnnnnnnnnnnnnnnnnnnnnnnnnnnnnnnnnnnnnnnnnnnnnnnnnnnnnnnnnnnnnnnnnnnnnnnnnnnnnnnnnnnnnnnnnnnnnnnnnnnnnnnnnnnnnnnnnnnnnnnnnnnnnnnnnnnnnnnnnnnnnnnnnnnnnnnnnnnnnnnnnnnnnnnnnnnnnnnnnnnnnnnnnnnnnnnnnnnnnnnnnnnnnnnnnnnnnnnnnnnnnnnnnnnnnnnnnnnnnnnnnnnnnnnnnnnnnnnnnnnnnnnnnnnnnnnnnnnnnnnnnnnnnnnnnnnnnnnnnnnnnnnnnnnnnnnnnnnnnnnnnnnnnnnnnnnnnnnnnnnnnnnnnnnnnnnnnnnnnnnnnnnnnnnnnnnnnnnnnnnnnnnnnnnnnnnnnnnnnnnnnnnnnnnnnnnnnnnnnnnnnnnnnnnnnnnnnnnnnnnnnnnnnnnnnnnnnnnnnnnnnnnnnnnnnnnnnnnnnnnnnnnnnnnnnnnnnnnnnnnnnnnnnnnnnnnnnnnnnnnnnnnnnnnnnnnnnnnnnnnnnnnnnnnnnnnnnnnnnnnnnnnnnnnnnnnnnnnnnnnnnnnnnnnnnnnnnnnnnnnnnnnnnnnnnnnnnnnnnnnnnnnnnnnnnnnnnnnnnnnnnnnnnnnnnnnnnnnnnnnnnnnnnnnnnnnnnnnnnnnnnnnnnnnnnnnnnnnnnnnnnnnnnnnnnnnnnnnnnnnnnnnnnnnnnnnnnnnnnnnnnnnnnnnnnnnnnnnnnnnnnnnnnnnnnnnnnnnnnnnnnnnnnnnnnnnnnnnnnnnnnnnnnnnnnnnnnnnnnnnnnnnnnnnnnnnnnnnnnnnnnnnnnnnnnnnnnnnnnnnnnnnnnnnnnnnnnnnnnnnnnnnnnnnnnnnnnnnnnnnnnnnnnnnnnnnnnnnnnnnnnnnnnnnnnnnnnnnnnnnnnnnnnnnnnnnnnnnnnnnnnnnnnnnnnnnnnnnnnnnnnnnnnnnnnnnnnnnnnnnnnnnnnnnnnnnnnnnnnnnnnnnnnnnnnnnnnnnnnnnnnnnnnnnnnnnnnnnnnnnnnnnnnnnnnnnnnnnnnnnnnnnnnnnnnnnnnnnnnnnnnnnnnnnnnnnnnnnnnnnnnnnnnnnnnnnnnnnnnnnnnnnnnnnnnnnnnnnnnnnnnnnnnnnnnnnnnnnnnnnnnnnnnnnnnnnnnnnnnnnnnnnnnnnnnnnnnnnnnnnnnnnnnnnnnnnnnnnnnnnnnnnnnnnnnnnnnnnnnnnnnnnnnnnnnnnnnnnnnnnnnnnnnnnnnnnnnnnnnnnnnnnnnnnnnnnnnnnnnnnnnnnnnnnnnnnnnnnnnnnnnnnnnnnnnnnnnnnnnnnnnnnnnnnnnnnnnnnnnnnnnnnnnnnnnnnnnnnnnnnnnnnnnnnnnnnnnnnnnnnnnnnnnnnnnnnnnnnnnnnnnnnnnnnnnnnnnnnnnnnnnnnnnnnnnnnnnnnnnnnnnnnnnnnnnnnnnnnnnnnnnnnnnnnnnnnnnnnnnnnnnnnnnnnnnnnnnnnnnnnnnnnnnnnnnnnnnnnnnnnnnnnnnnnnnnnnnnnnnnnnnnnnnnnnnnnnnnnnnnnnnnnnnnnnnnnnnnnnnnnnnnnnnnnnnnnnnnnnnnnnnnnnnnnnnnnnnnnnnnnnnnnnnnnnnnnnnnnnnnnnnnnnnnnnnnnnnnnnnnnnnnnnnnnnnnnnnnnnnnnnnnnnnnnnnnnnnnnnnnnnnnnnnnnnnnnnnnnnnnnnnnnnnnnnnnnnnnnnnnnnnnnnnnnnnnnnnnnnnnnnnnnnnnnnnnnnnnnnnnnnnnnnnnnnnnnnnnnnnnnnnnnnnnnnnnnnnnnnnnnnnnnnnnnnnnnnnnnnnnnnnnnnnnnnnnnnnnnnnnnnnnnnnnnnnnnnnnnnnnnnnnnnnnnnnnnnnnnnnnnnnnnnnnnnnnnnnnnnnnnnnnnnnnnnnnnnnnnnnnnnnnnnnnnnnnnnnnnnnnnnnnnnnnnnnnnnnnnnnnnnnnnnnnnnnnnnnnnnnnnnnnnnnnnnnnnnnnnnnnnnnnnnnnnnnnnnnnnnnnnnnnnnnnnnnnnnnnnnnnnnnnnnnnnnnnnnnnnnnnnnnnnnnnnnnnnnnnnnnnnnnnnnnnnnnnnnnnnnnnnnnnnnnnnnnnnnnnnnnnnnnnnnnnnnnnnnnnnnnnnnnnnnnnnnnnnnnnnnnnnnnnnnnnnnnnnnnnnnnnnnnnnnnnnnnnnnnnnnnnnnnnnnnnnnnnnnnnnnnnnnnnnnnnnnnnnnnnnnnnnnnnnnnnnnnnnnnnnnnnnnnnnnnnnnnnnnnnnnnnnnnnnnnnnnnnnnnnnnnnnnnnnnnnnnnnnnnnnnnnnnnnnnnnnnnnnnnnnnnnnnnnnnnnnnnnnnnnnnnnnnnnnnnnnnnnnnnnnnnnnnnnnnnnnnnnnnnnnnnnnnnnnnnnnnnnnnnnnnnnnnnnnnnnnnnnnnnnnnnnnnnnnnnnnnnnnnnnnnnnnnnnnnnnnnnnnnnnnnnnnnnnnnnnnnnnnnnnnnnnnnnnnnnnnnnnnnnnnnnnnnnnnnnnnnnnnnnnnnnnnnnnnnnnnnnnnnnnnnnnnnnnnnnnnnnnnnnnnnnnnnnnnnnnnnnnnnnnnnnnnnnnnnnnnnnnnnnnnnnnnnnnnnnnnnnnnnnnnnnnnnnnnnnnnnnnnnnnnnnnnnnnnnnnnnnnnnnnnnnnnnnnnnnnnnnnnnnnnnnnnnnnnnnnnnnnnnnnnnnnnnnnnnnnnnnnnnnnnnnnnnnnnnnnnnnnnnnnnnnnnnnnnnnnnnnnnnnnnnnnnnnnnnnnnnnnnnnnnnnnnnnnnnnnnnnnnnnnnnnnnnnnnnnnnnnnnnnnnnnnnnnnnnnnnnnnnnnnnnnnnnnnnnnnnnnnnnnnnnnnnnnnnnnnnnnnnnnnnnnnnnnnnnnnnnnnnnnnnnnnnnnnnnnnnnnnnnnnnnnnnnnnnnnnnnnnnnnnnnnnnnnnnnnnnnnnnnnnnnnnnnnnnnnnnnnnnnnnnnnnnnnnnnnnnnnnnnnnnnnnnnnnnnnnnnnnnnnnnnnnnnnnnnnnnnnnnnnnnnnnnnnnnnnnnnnnnnnnnnnnnnnnnnnnnnnnnnnnnnnnnnnnnnnnnnnnnnnnnnnnnnnnnnnnnnnnnnnnnnnnnnnnnnnnnnnnnnnnnnnnnnnnnnnnnnnnnnnnnnnnnnnnnnnnnnnnnnnnnnnnnnnnnnnnnnnnnnnnnnnnnnnnnnnnnnnnnnnnnnnnnnnnnnnnnnnnnnnnnnnnnnnnnnnnnnnnnnnnnnnnnnnnnnnnnnnnnnnnnnnnnnnnnnnnnnnnnnnnnnnnnnnnnnnnnnnnnnnnnnnnnnnnnnnnnnnnnnnnnnnnnnnnnnnnnnnnnnnnnnnnnnnnnnnnnnnnnnnnnnnnnnnnnnnnnnnnnnnnnnnnnnnnnnnnnnnnnnnnnnnnnnnnnnnnnnnnnnnnnnnnnnnnnnnnnnnnnnnnnnnnnnnnnnnnnnnnnnnnnnnnnnnnnnnnnnnnnnnnnnnnnnnnnnnnnnnnnnnnnnnnnnnnnnnnnnnnnnnnnnnnnnnnnnnnnnnnnnnnnnnnnnnnnnnnnnnnnnnnnnnnnnnnnnnnnnnnnnnnnnnnnnnnnnnnnnnnnnnnnnnnnnnnnnnnnnnnnnnnnnnnnnnnnnnnnnnnnnnnnnnnnnnnnnnnnnnnnnnnnnnnnnnnnnnnnnnnnnnnnnnnnnnnnnnnnnnnnnnnnnnnnnnnnnnnnnnnnnnnnnnnnnnnnnnnnnnnnnnnnnnnnnnnnnnnnnnnnnnnnnnnnnnnnnnnnnnnnnnnnnnnnnnnnnnnnnnnnnnnnnnnnnnnnnnnnnnnnnnnnnnnnnnnnnnnnnnnnnnnnnnnnnnnnnnnnnnnnnnnnnnnnnnnnnnnnnnnnnnnnnnnnnnnnnnnnnnnnnnnnnnnnnnnnnnnnnnnnnnnnnnnnnnnnnnnnnnnnnnnnnnnnnnnnnnnnnnnnnnnnnnnnnnnnnnnnnnnnnnnnnnnnnnnnnnnnnnnnnnnnnnnnnnnnnnnnnnnnnnnnnnnnnnnnnnnnnnnnnnnnnnnnnnnnnnnnnnnnnnnnnnnnnnnnnnnnnnnnnnnnnnnnnnnnnnnnnnnnnnnnnnnnnnnnnnnnnnnnnnnnnnnnnnnnnnnnnnnnnnnnnnnnnnnnnnnnnnnnnnnnnnnnnnnnnnnnnnnnnnnnnnnnnnnnnnnnnnnnnnnnnnnnnnnnnnnnnnnnnnnnnnnnnnnnnnnnnnnnnnnnnnnnnnnnnnnnnnnnnnnnnnnnnnnnnnnnnnnnnnnnnnnnnnnnnnnnnnnnnnnnnnnnnnnnnnnnnnnnnnnnnnnnnnnnnnnnnnnnnnnnnnnnnnnnnnnnnnnnnnnnnnnnnnnnnnnnnnnnnnnnnnnnnnnnnnnnnnnnnnnnnnnnnnnnnnnnnnnnnnnnnnnnnnnnnnnnnnnnnnnnnnnnnnnnnnnnnnnnnnnnnnnnnnnnnnnnnnnnnnnnnnnnnnnnnnnnnnnnnnnnnnnnnnnnnnnnnnnnnnnnnnnnnnnnnnnnnnnnnnnnnnnnnnnnnnnnnnnnnnnnnnnnnnnnnnnnnnnnnnnnnnnnnnnnnnnnnnnnnnnnnnnnnnnnnnnnnnnnnnnnnnnnnnnnnnnnnnnnnnnnnnnnnnnnnnnnnnnnnnnnnnnnnnnnnnnnnnnnnnnnnnnnnnnnnnnnnnnnnnnnnnnnnnnnnnnnnnnnnnnnnnnnnnnnnnnnnnnnnnnnnnnnnnnnnnnnnnnnnnnnnnnnnnnnnnnnnnnnnnnnnnnnnnnnnnnnnnnnnnnnnnnnnnnnnnnnnnnnnnnnnnnnnnnnnnnnnnnnnnnnnnnnnnnnnnnnnnnnnnnnnnnnnnnnnnnnnnnnnnnnnnnnnnnnnnnnnnnnnnnnnnnnnnnnnnnnnnnnnnnnnnnnnnnnnnnnnnnnnnnnnnnnnnnnnnnnnnnnnnnnnnnnnnnnnnnnnnnnnnnnnnnnnnnnnnnnnnnnnnnnnnnnnnnnnnnnnnnnnnnnnnnnnnnnnnnnnnnnnnnnnnnnnnnnnnnnnnnnnnnnnnnnnnnnnnnnnnnnnnnnnnnnnnnnnnnnnnnnnnnnnnnnnnnnnnnnnnnnnnnnnnnnnnnnnnnnnnnnnnnnnnnnnnnnnnnnnnnnnnnnnnnnnnnnnnnnnnnnnnnnnnnnnnnnnnnnnnnnnnnnnnnnnnnnnnnnnnnnnnnnnnnnnnnnnnnnnnnnnnnnnnnnnnnnnnnnnnnnnnnnnnnnnnnnnnnnnnnnnnnnnnnnnnnnnnnnnnnnnnnnnnnnnnnnnnnnnnnnnnnnnnnnnnnnnnnnnnnnnnnnnnnnnnnnnnnnnnnnnnnnnnnnnnnnnnnnnnnnnnnnnnnnnnnnnnnnnnnnnnnnnnnnnnnnnnnnnnnnnnnnnnnnnnnnnnnnnnnnnnnnnnnnnnnnnnnnnnnnnnnnnnnnnnnnnnnnnnnnnnnnnnnnnnnnnnnnnnnnnnnnnnnnnnnnnnnnnnnnnnnnnnnnnnnnnnnnnnnnnnnnnnnnnnnnnnnnnnnnnnnnnnnnnnnnnnnnnnnnnnnnnnnnnnnnnnnnnnnnnnnnnnnnnnnnnnnnnnnnnnnnnnnnnnnnnnnnnnnnnnnnnnnnnnnnnnnnnnnnnnnnnnnnnnnnnnnnnnnnnnnnnnnnnnnnnnnnnnnnnnnnnnnnnnnnnnnnnnnnnnnnnnnnnnnnnnnnnnnnnnnnnnnnnnnnnnnnnnnnnnnnnnnnnnnnnnnnnnnnnnnnnnnnnnnnnnnnnnnnnnnnnnnnnnnnnnnnnnnnnnnnnnnnnnnnnnnnnnnnnnnnnnnnnnnnnnnnnnnnnnnnnnnnnnnnnnnnnnnnnnnnnnnnnnnnnnnnnnnnnnnnnnnnnnnnnnnnnnnnnnnnnnnnnnnnnnnnnnnnnnnnnnnnnnnnnnnnnnnnnnnnnnnnnnnnnnnnnnnnnnnnnnnnnnnnnnnnnnnnnnnnnnnnnnnnnnnnnnnnnnnnnnnnnnnnnnnnnnnnnnnnnnnnnnnnnnnnnnnnnnnnnnnnnnnnnnnnnnnnnnnnnnnnnnnnnnnnnnnnnnnnnnnnnnnnnnnnnnnnnnnnnnnnnnnnnnnnnnnnnnnnnnnnnnnnnnnnnnnnnnnnnnnnnnnnnnnnnnnnnnnnnnnnnnnnnnnnnnnnnnnnnnnnnnnnnnnnnnnnnnnnnnnnnnnnnnnnnnnnnnnnnnnnnnnnnnnnnnnnnnnnnnnnnnnnnnnnnnnnnnnnnnnnnnnnnnnnnnnnnnnnnnnnnnnnnnnnnnnnnnnnnnnnnnnnnnnnnnnnnnnnnnnnnnnnnnnnnnnnnnnnnnnnnnnnnnnnnnnnnnnnnnnnnnnnnnnnnnnnnnnnnnnnnnnnnnnnnnnnnnnnnnnnnnnnnnnnnnnnnnnnnnnnnnnnnnnnnnnnnnnnnnnnnnnnnnnnnnnnnnnnnnnnnnnnnnnnnnnnnnnnnnnnnnnnnnnnnnnnnnnnnnnnnnnnnnnnnnnnnnnnnnnnnnnnnnnnnnnnnnnnnnnnnnnnnnnnnnnnnnnnnnnnnnnnnnnnnnnnnnnnnnnnnnnnnnnnnnnnnnnnnnnnnnnnnnnnnnnnnnnnnnnnnnnnnnnnnnnnnnnnnnnnnnnnnnnnnnnnnnnnnnnnnnnnnnnnnnnnnnnnnnnnnnnnnnnnnnnnnnnnnnnnnnnnnnnnnnnnnnnnnnnnnnnnnnnnnnnnnnnnnnnnnnnnnnnnnnnnnnnnnnnnnnnnnnnnnnnnnnnnnnnnnnnnnnnnnnnnnnnnnnnnnnnnnnnnnnnnnnnnnnnnnnnnnnnnnnnnnnnnnnnnnnnnnnnnnnnnnnnnnnnnnnnnnnnnnnnnnnnnnnnnnnnnnnnnnnnnnnnnnnnnnnnnnnnnnnnnnnnnnnnnnnnnnnnnnnnnnnnnnnnnnnnnnnnnnnnnnnnnnnnnnnnnnnnnnnnnnnnnnnnnnnnnnnnnnnnnnnnnnnnnnnnnnnnnnnnnnnnnnnnnnnnnnnnnnnnnnnnnnnnnnnnnnnnnnnnnnnnnnnnnnnnnnnnnnnnnnnnnnnnnnnnnnnnnnnnnnnnnnnnnnnnnnnnnnnnnnnnnnnnnnnnnnnnnnnnnnnnnnnnnnnnnnnnnnnnnnnnnnnnnnnnnnnnnnnnnnnnnnnnnnnnnnnnnnnnnnnnnnnnnnnnnnnnnnnnnnnnnnnnnnnnnnnnnnnnnnnnnnnnnnnnnnnnnnnnnnnnnnnnnnnnnnnnnnnnnnnnnnnnnnnnnnnnnnnnnnnnnnnnnnnnnnnnnnnnnnnnnnnnnnnnnnnnnnnnnnnnnnnnnnnnnnnnnnnnnnnnnnnnnnnnnnnnnnnnnnnnnnnnnnnnnnnnnnnnnnnnnnnnnnnnnnnnnnnnnnnnnnnnnnnnnnnnnnnnnnnnnnnnnnnnnnnnnnnnnnnnnnnnnnnnnnnnnnnnnnnnnnnnnnnnnnnnnnnnnnnnnnnnnnnnnnnnnnnnnnnnnnnnnnnnnnnnnnnnnnnnnnnnnnnnnnnnnnnnnnnnnnnnnnnnnnnnnnnnnnnnnnnnnnnnnnnnnnnnnnnnnnnnnnnnnnnnnnnnnnnnnnnnnnnnnnnnnnnnnnnnnnnnnnnnnnnnnnnnnnnnnnnnnnnnnnnnnnnnnnnnnnnnnnnnnnnnnnnnnnnnnnnnnnnnnnnnnnnnnnnnnnnnnnnnnnnnnnnnnnnnnnnnnnnnnnnnnnnnnnnnnnnnnnnnnnnnnnnnnnnnnnnnnnnnnnnnnnnnnnnnnnnnnnnnnnnnnnnnnnnnnnnnnnnnnnnnnnnnnnnnnnnnnnnnnnnnnnnnnnnnnnnnnnnnnnnnnnnnnnnnnnnnnnnnnnnnnnnnnnnnnnnnnnnnnnnnnnnnnnnnnnnnnnnnnnnnnnnnnnnnnnnnnnnnnnnnnnnnnnnnnnnnnnnnnnnnnnnnnnnnnnnnnnnnnnnnnnnnnnnnnnnnnnnnnnnnnnnnnnnnnnnnnnnnnnnnnnnnnnnnnnnnnnnnnnnnnnnnnnnnnnnnnnnnnnnnnnnnnnnnnnnnnnnnnnnnnnnnnnnnnnnnnnnnnnnnnnnnnnnnnnnnnnnnnnnnnnnnnnnnnnnnnnnnnnnnnnnnnnnnnnnnnnnnnnnnnnnnnnnnnnnnnnnnnnnnnnnnnnnnnnnnnnnnnnnnnnnnnnnnnnnnnnnnnnnnnnnnnnnnnnnnnnnnnnnnnnnnnnnnnnnnnnnnnnnnnnnnnnnnnnnnnnnnnnnnnnnnnnnnnnnnnnnnnnnnnnnnnnnnnnnnnnnnnnnnnnnnnnnnnnnnnnnnnnnnnnnnnnnnnnnnnnnnnnnnnnnnnnnnnnnnnnnnnnnnnnnnnnnnnnnnnnnnnnnnnnnnnnnnnnnnnnnnnnnnnnnnnnnnnnnnnnnnnnnnnnnnnnnnnnnnnnnnnnnnnnnnnnnnnnnnnnnnnnnnnnnnnnnnnnnnnnnnnnnnnnnnnnnnnnnnnnnnnnnnnnnnnnnnnnnnnnnnnnnnnnnnnnnnnnnnnnnnnnnnnnnnnnnnnnnnnnnnnnnnnnnnnnnnnnnnnnnnnnnnnnnnnnnnnnnnnnnnnnnnnnnnnnnnnnnnnnnnnnnnnnnnnnnnnnnnnnnnnnnnnnnnnnnnnnnnnnnnnnnnnnnnnnnnnnnnnnnnnnnnnnnnnnnnnnnnnnnnnnnnnnnnnnnnnnnnnnnnnnnnnnnnnnnnnnnnnnnnnnnnnnnnnnnnnnnnnnnnnnnnnnnnnnnnnnnnnnnnnnnnnnnnnnnnnnnnnnnnnnnnnnnnnnnnnnnnnnnnnnnnnnnnnnnnnnnnnnnnnnnnnnnnnnnnnnnnnnnnnnnnnnnnnnnnnnnnnnnnnnnnnnnnnnnnnnnnnnnnnnnnnnnnnnnnnnnnnnnnnnnnnnnnnnnnnnnnnnnnnnnnnnnnnnnnnnnnnnnnnnnnnnnnnnnnnnnnnnnnnnnnnnnnnnnnnnnnnnnnnnnnnnnnnnnnnnnnnnnnnnnnnnnnnnnnnnnnnnnnnnnnnnnnnnnnnnnnnnnnnnnnnnnnnnnnnnnnnnnnnnnnnnnnnnnnnnnnnnnnnnnnnnnnnnnnnnnnnnnnnnnnnnnnnnnnnnnnnnnnnnnnnnnnnnnnnnnnnnnnnnnnnnnnnnnnnnnnnnnnnnnnnnnnnnnnnnnnnnnnnnnnnnnnnnnnnnnnnnnnnnnnnnnnnnnnnnnnnnnnnnnnnnnnnnnnnnnnnnnnnnnnnnnnnnnnnnnnnnnnnnnnnnnnnnnnnnnnnnnnnnnnnnnnnnnnnnnnnnnnnnnnnnnnnnnnnnnnnnnnnnnnnnnnnnnnnnnnnnnnnnnnnnnnnnnnnnnnnnnnnnnnnnnnnnnnnnnnnnnnnnnnnnnnnnnnnnnnnnnnnnnnnnnnnnnnnnnnnnnnnnnnnnnnnnnnnnnnnnnnnnnnnnnnnnnnnnnnnnnnnnnnnnnnnnnnnnnnnnnnnnnnnnnnnnnnnnnnnnnnnnnnnnnnnnnnnnnnnnnnnnnnnnnnnnnnnnnnnnnnnnnnnnnnnnnnnnnnnnnnnnnnnnnnnnnnnnnnnnnnnnnnnnnnnnnnnnnnnnnnnnnnnnnnnnnnnnnnnnnnnnnnnnnnnnnnnnnnnnnnnnnnnnnnnnnnnnnnnnnnnnnnnnnnnnnnnnnnnnnnnnnnnnnnnnnnnnnnnnnnnnnnnnnnnnnnnnnnnnnnnnnnnnnnnnnnnnnnnnnnnnnnnnnnnnnnnnnnnnnnnnnnnnnnnnnnnnnnnnnnnnnnnnnnnnnnnnnnnnnnnnnnnnnnnnnnnnnnnnnnnnnnnnnnnnnnnnnnnnnnnnnnnnnnnnnnnnnnnnnnnnnnnnnnnnnnnnnnnnnnnnnnnnnnnnnnnnnnnnnnnnnnnnnnnnnnnnnnnnnnnnnnnnnnnnnnnnnnnnnnnnnnnnnnnnnnnnnnnnnnnnnnnnnnnnnnnnnnnnnnnnnnnnnnnnnnnnnnnnnnnnnnnnnnnnnnnnnnnnnnnnnnnnnnnnnnnnnnnnnnnnnnnnnnnnnnnnnnnnnnnnnnnnnnnnnnnnnnnnnnnnnnnnnnnnnnnnnnnnnnnnnnnnnnnnnnnnnnnnnnnnnnnnnnnnnnnnnnnnnnnnnnnnnnnnnnnnnnnnnnnnnnnnnnnnnnnnnnnnnnnnnnnnnnnnnnnnnnnnnnnnnnnnnnnnnnnnnnnnnnnnnnnnnnnnnnnnnnnnnnnnnnnnnnnnnnnnnnnnnnnnnnnnnnnnnnnnnnnnnnnnnnnnnnnnnnnnnnnnnnnnnnnnnnnnnnnnnnnnnnnnnnnnnnnnnnnnnnnnnnnnnnnnnnnnnnnnnnnnnnnnnnnnnnnnnnnnnnnnnnnnnnnnnnnnnnnnnnnnnnnnnnnnnnnnnnnnnnnnnnnnnnnnnnnnnnnnnnnnnnnnnnnnnnnnnnnnnnnnnnnnnnnnnnnnnnnnnnnnnnnnnnnnnnnnnnnnnnnnnnnnnnnnnnnnnnnnnnnnnnnnnnnnnnnnnnnnnnnnnnnnnnnnnnnnnnnnnnnnnnnnnnnnnnnnnnnnnnnnnnnnnnnnnnnnnnnnnnnnnnnnnnnnnnnnnnnnnnnnnnnnnnnnnnnnnnnnnnnnnnnnnnnnnnnnnnnnnnnnnnnnnnnnnnnnnnnnnnnnnnnnnnnnnnnnnnnnnnnnnnnnnnnnnnnnnnnnnnnnnnnnnnnnnnnnnnnnnnnnnnnnnnnnnnnnnnnnnnnnnnnnnnnnnnnnnnnnnnnnnnnnnnnnnnnnnnnnnnnnnnnnnnnnnnnnnnnnnnnnnnnnnnnnnnnnnnnnnnnnnnnnnnnnnnnnnnnnnnnnnnnnnnnnnnnnnnnnnnnnnnnnnnnnnnnnnnnnnnnnnnnnnnnnnnnnnnnnnnnnnnnnnnnnnnnnnnnnnnnnnnnnnnnnnnnnnnnnnnnnnnnnnnnnnnnnnnnnnnnnnnnnnnnnnnnnnnnnnnnnnnnnnnnnnnnnnnnnnnnnnnnnnnnnnnnnnnnnnnnnnnnnnnnnnnnnnnnnnnnnnnnnnnnnnnnnnnnnnnnnnnnnnnnnnnnnnnnnnnnnnnnnnnnnnnnnnnnnnnnnnnnnnnnnnnnnnnnnnnnnnnnnnnnnnnnnnnnnnnnnnnnnnnnnnnnnnnnnnnnnnnnnnnnnnnnnnnnnnnnnnnnnnnnnnnnnnnnnnnnnnnnnnnnnnnnnnnnnnnnnnnnnnnnnnnnnnnnnnnnnnnnnnnnnnnnnnnnnnnnnnnnnnnnnnnnnnnnnnnnnnnnnnnnnnnnnnnnnnnnnnnnnnnnnnnnnnnnnnnnnnnnnnnnnnnnnnnnnnnnnnnnnnnnnnnnnnnnnnnnnnnnnnnnnnnnnnnnnnnnnnnnnnnnnnnnnnnnnnnnnnnnnnnnnnnnnnnnnnnnnnnnnnnnnnnnnnnnnnnnnnnnnnnnnnnnnnnnnnnnnnnnnnnnnnnnnnnnnnnnnnnnnnnnnnnnnnnnnnnnnnnnnnnnnnnnnnnnnnnnnnnnnnnnnnnnnnnnnnnnnnnnnnnnnnnnnnnnnnnnnnnnnnnnnnnnnnnnnnnnnnnnnnnnnnnnnnnnnnnnnnnnnnnnnnnnnnnnnnnnnnnnnnnnnnnnnnnnnnnnnnnnnnnnnnnnnnnnnnnnnnnnnnnnnnnnnnnnnnnnnnnnnnnnnnnnnnnnnnnnnnnnnnnnnnnnnnnnnnnnnnnnnnnnnnnnnnnnnnnnnnnnnnnnnnnnnnnnnnnnnnnnnnnnnnnnnnnnnnnnnnnnnnnnnnnnnnnnnnnnnnnnnnnnnnnnnnnnnnnnnnnnnnnnnnnnnnnnnnnnnnnnnnnnnnnnnnnnnnnnnnnnnnnnnnnnnnnnnnnnnnnnnnnnnnnnnnnnnnnnnnnnnnnnnnnnnnnnnnnnnnnnnnnnnnnnnnnnnnnnnnnnnnnnnnnnnnnnnnnnnnnnnnnnnnnnnnnnnnnnnnnnnnnnnnnnnnnnnnnnnnnnnnnnnnnnnnnnnnnnnnnnnnnnnnnnnnnnnnnnnnnnnnnnnnnnnnnnnnnnnnnnnnnnnnnnnnnnnnnnnnnnnnnnnnnnnnnnnnnnnnnnnnnnnnnnnnnnnnnnnnnnnnnnnnnnnnnnnnnnnnnnnnnnnnnnnnnnnnnnnnnnnnnnnnnnnnnnnnnnnnnnnnnnnnnnnnnnnnnnnnnnnnnnnnnnnnnnnnnnnnnnnnnnnnnnnnnnnnnnnnnnnnnnnnnnnnnnnnnnnnnnnnnnnnnnnnnnnnnnnnnnnnnnnnnnnnnnnnnnnnnnnnnnnnnnnnnnnnnnnnnnnnnnnnnnnnnnnnnnnnnnnnnnnnnnnnnnnnnnnnnnnnnnnnnnnnnnnnnnnnnnnnnnnnnnnnnnnnnnnnnnnnnnnnnnnnnnnnnnnnnnnnnnnnnnnnnnnnnnnnnnnnnnnnnnnnnnnnnnnnnnnnnnnnnnnnnnnnnnnnnnnnnnnnnnnnnnnnnnnnnnnnnnnnnnnnnnnnnnnnnnnnnnnnnnnnnnnnnnnnnnnnnnnnnnnnnnnnnnnnnnnnnnnnnnnnnnnnnnnnnnnnnnnnnnnnnnnnnnnnnnnnnnnnnnnnnnnnnnnnnnnnnnnnnnnnnnnnnnnnnnnnnnnnnnnnnnnnnnnnnnnnnnnnnnnnnnnnnnnnnnnnnnnnnnnnnnnnnnnnnnnnnnnnnnnnnnnnnnnnnnnnnnnnnnnnnnnnnnnnnnnnnnnnnnnnnnnnnnnnnnnnnnnnnnnnnnnnnnnnnnnnnnnnnnnnnnnnnnnnnnnnnnnnnnnnnnnnnnnnnnnnnnnnnnnnnnnnnnnnnnnnnnnnnnnnnnnnnnnnnnnnnnnnnnnnnnnnnnnnnnnnnnnnnnnnnnnnnnnnnnnnnnnnnnnnnnnnnnnnnnnnnnnnnnnnnnnnnnnnnnnnnnnnnnnnnnnnnnnnnnnnnnnnnnnnnnnnnnnnnnnnnnnnnnnnnnnnnnnnnnnnnnnnnnnnnnnnnnnnnnnnnnnnnnnnnnnnnnnnnnnnnnnnnnnnnnnnnnnnnnnnnnnnnnnnnnnnnnnnnnnnnnnnnnnnnnnnnnnnnnnnnnnnnnnnnnnnnnnnnnnnnnnnnnnnnnnnnnnnnnnnnnnnnnnnnnnnnnnnnnnnnnnnnnnnnnnnnnnnnnnnnnnnnnnnnnnnnnnnnnnnnnnnnnnnnnnnnnnnnnnnnnnnnnnnnnnnnnnnnnnnnnnnnnnnnnnnnnnnnnnnnnnnnnnnnnnnnnnnnnnnnnnnnnnnnnnnnnnnnnnnnnnnnnnnnnnnnnnnnnnnnnnnnnnnnnnnnnnnnnnnnnnnnnnnnnnnnnnnnnnnnnnnnnnnnnnnnnnnnnnnnnnnnnnnnnnnnnnnnnnnnnnnnnnnnnnnnnnnnnnnnnnnnnnnnnnnnnnnnnnnnnnnnnnnnnnnnnnnnnnnnnnnnnnnnnnnnnnnnnnnnnnnnnnnnnnnnnnnnnnnnnnnnnnnnnnnnnnnnnnnnnnnnnnnnnnnnnnnnnnnnnnnnnnnnnnnnnnnnnnnnnnnnnnnnnnnnnnnnnnnnnnnnnnnnnnnnnnnnnnnnnnnnnnnnnnnnnnnnnnnnnnnnnnnnnnnnnnnnnnnnnnnnnnnnnnnnnnnnnnnnnnnnnnnnnnnnnnnnnnnnnnnnnnnnnnnnnnnnnnnnnnnnnnnnnnnnnnnnnnnnnnnnnnnnnnnnnnnnnnnnnnnnnnnnnnnnnnnnnnnnnnnnnnnnnnnnnnnnnnnnnnnnnnnnnnnnnnnnnnnnnnnnnnnnnnnnnnnnnnnnnnnnnnnnnnnnnnnnnnnnnnnnnnnnnnnnnnnnnnnnnnnnnnnnnnnnnnnnnnnnnnnnnnnnnnnnnnnnnnnnnnnnnnnnnnnnnnnnnnnnnnnnnnnnnnnnnnnnnnnnnnnnnnnnnnnnnnnnnnnnnnnnnnnnnnnnnnnnnnnnnnnnnnnnnnnnnnnnnnnnnnnnnnnnnnnnnnnnnnnnnnnnnnnnnnnnnnnnnnnnnnnnnnnnnnnnnnnnnnnnnnnnnnnnnnnnnnnnnnnnnnnnnnnnnnnnnnnnnnnnnnnnnnnnnnnnnnnnnnnnnnnnnnnnnnnnnnnnnnnnnnnnnnnnnnnnnnnnnnnnnnnnnnnnnnnnnnnnnnnnnnnnnnnnnnnnnnnnnnnnnnnnnnnnnnnnnnnnnnnnnnnnnnnnnnnnnnnnnnnnnnnnnnnnnnnnnnnnnnnnnnnnnnnnnnnnnnnnnnnnnnnnnnnnnnnnnnnnnnnnnnnnnnnnnnnnnnnnnnnnnnnnnnnnnnnnnnnnnnnnnnnnnnnnnnnnnnnnnnnnnnnnnnnnnnnnnnnnnnnnnnnnnnnnnnnnnnnnnnnnnnnnnnnnnnnnnnnnnnnnnnnnnnnnnnnnnnnnnnnnnnnnnnnnnnnnnnnnnnnnnnnnnnnnnnnnnnnnnnnnnnnnnnnnnnnnnnnnnnnnnnnnnnnnnnnnnnnnnnnnnnnnnnnnnnnnnnnnnnnnnnnnnnnnnnnnnnnnnnnnnnnnnnnnnnnnnnnnnnnnnnnnnnnnnnnnnnnnnnnnnnnnnnnnnnnnnnnnnnnnnnnnnnnnnnnnnnnnnnnnnnnnnnnnnnnnnnnnnnnnnnnnnnnnnnnnnnnnnnnnnnnnnnnnnnnnnnnnnnnnnnnnnnnnnnnnnnnnnnnnnnnnnnnnnnnnnnnnnnnnnnnnnnnnnnnnnnnnnnnnnnnnnnnnnnnnnnnnnnnnnnnnnnnnnnnnnnnnnnnnnnnnnnnnnnnnnnnnnnnnnnnnnnnnnnnnnnnnnnnnnnnnnnnnnnnnnnnnnnnnnnnnnnnnnnnnnnnnnnnnnnnnnnnnnnnnnnnnnnnnnnnnnnnnnnnnnnnnnnnnnnnnnnnnnnnnnnnnnnnnnnnnnnnnnnnnnnnnnnnnnnnnnnnnnnnnnnnnnnnnnnnnnnnnnnnnnnnnnnnnnnnnnnnnnnnnnnnnnnnnnnnnnnnnnnnnnnnnnnnnnnnnnnnnnnnnnnnnnnnnnnnnnnnnnnnnnnnnnnnnnnnnnnnnnnnnnnnnnnnnnnnnnnnnnnnnnnnnnnnnnnnnnnnnnnnnnnnnnnnnnnnnnnnnnnnnnnnnnnnnnnnnnnnnnnnnnnnnnnnnnnnnnnnnnnnnnnnnnnnnnnnnnnnnnnnnnnnnnnnnnnnnnnnnnnnnnnnnnnnnnnnnnnnnnnnnnnnnnnnnnnnnnnnnnnnnnnnnnnnnnnnnnnnnnnnnnnnnnnnnnnnnnnnnnnnnnnnnnnnnnnnnnnnnnnnnnnnnnnnnnnnnnnnnnnnnnnnnnnnnnnnnnnnnnnnnnnnnnnnnnnnnnnnnnnnnnnnnnnnnnnnnnnnnnnnnnnnnnnnnnnnnnnnnnnnnnnnnnnnnnnnnnnnnnnnnnnnnnnnnnnnnnnnnnnnnnnnnnnnnnnnnnnnnnnnnnnnnnnnnnnnnnnnnnnnnnnnnnnnnnnnnnnnnnnnnnnnnnnnnnnnnnnnnnnnnnnnnnnnnnnnnnnnnnnnnnnnnnnnnnnnnnnnnnnnnnnnnnnnnnnnnnnnnnnnnnnnnnnnnnnnnnnnnnnnnnnnnnnnnnnnnnnnnnnnnnnnnnnnnnnnnnnnnnnnnnnnnnnnnnnnnnnnnnnnnnnnnnnnnnnnnnnnnnnnnnnnnnnnnnnnnnnnnnnnnnnnnnnnnnnnnnnnnnnnnnnnnnnnnnnnnnnnnnnnnnnnnnnnnnnnnnnnnnnnnnnnnnnnnnnnnnnnnnnnnnnnnnnnnnnnnnnnnnnnnnnnnnnnnnnnnnnnnnnnnnnnnnnnnnnnnnnnnnnnnnnnnnnnnnnnnnnnnnnnnnnnnnnnnnnnnnnnnnnnnnnnnnnnnnnnnnnnnnnnnnnnnnnnnnnnnnnnnnnnnnnnnnnnnnnnnnnnnnnnnnnnnnnnnnnnnnnnnnnnnnnnnnnnnnnnnnnnnnnnnnnnnnnnnnnnnnnnnnnnnnnnnnnnnnnnnnnnnnnnnnnnnnnnnnnnnnnnnnnnnnnnnnnnnnnnnnnnnnnnnnnnnnnnnnnnnnnnnnnnnnnnnnnnnnnnnnnnnnnnnnnnnnnnnnnnnnnnnnnnnnnnnnnnnnnnnnnnnnnnnnnnnnnnnnnnnnnnnnnnnnnnnnnnnnnnnnnnnnnnnnnnnnnnnnnnnnnnnnnnnnnnnnnnnnnnnnnnnnnnnnnnnnnnnnnnnnnnnnnnnnnnnnnnnnnnnnnnnnnnnnnnnnnnnnnnnnnnnnnnnnnnnnnnnnnnnnnnnnnnnnnnnnnnnnnnnnnnnnnnnnnnnnnnnnnnnnnnnnnnnnnnnnnnnnnnnnnnnnnnnnnnnnnnnnnnnnnnnnnnnnnnnnnnnnnnnnnnnnnnnnnnnnnnnnnnnnnnnnnnnnnnnnnnnnnnnnnnnnnnnnnnnnnnnnnnnnnnnnnnnnnnnnnnnnnnnnnnnnnnnnnnnnnnnnnnnnnnnnnnnnnnnnnnnnnnnnnnnnnnnnnnnnnnnnnnnnnnnnnnnnnnnnnnnnnnnnnnnnnnnnnnnnnnnnnnnnnnnnnnnnnnnnnnnnnnnnnnnnnnnnnnnnnnnnnnnnnnnnnnnnnnnnnnnnnnnnnnnnnnnnnnnnnnnnnnnnnnnnnnnnnnnnnnnnnnnnnnnnnnnnnnnnnnnnnnnnnnnnnnnnnnnnnnnnnnnnnnnnnnnnnnnnnnnnnnnnnnnnnnnnnnnnnnnnnnnnnnnnnnnnnnnnnnnnnnnnnnnnnnnnnnnnnnnnnnnnnnnnnnnnnnnnnnnnnnnnnnnnnnnnnnnnnnnnnnnnnnnnnnnnnnnnnnnnnnnnnnnnnnnnnnnnnnnnnnnnnnnnnnnnnnnnnnnnnnnnnnnnnnnnnnnnnnnnnnnnnnnnnnnnnnnnnnnnnnnnnnnnnnnnnnnnnnnnnnnnnnnnnnnnnnnnnnnnnnnnnnnnnnnnnnnnnnnnnnnnnnnnnnnnnnnnnnnnnnnnnnnnnnnnnnnnnnnnnnnnnnnnnnnnnnnnnnnnnnnnnnnnnnnnnnnnnnnnnnnnnnnnnnnnnnnnnnnnnnnnnnnnnnnnnnnnnnnnnnnnnnnnnnnnnnnnnnnnnnnnnnnnnnnnnnnnnnnnnnnnnnnnnnnnnnnnnnnnnnnnnnnnnnnnnnnnnnnnnnnnnnnnnnnnnnnnnnnnnnnnnnnnnnnnnnnnnnnnnnnnnnnnnnnnnnnnnnnnnnnnnnnnnnnnnnnnnnnnnnnnnnnnnnnnnnnnnnnnnnnnnnnnnnnnnnnnnnnnnnnnnnnnnnnnnnnnnnnnnnnnnnnnnnnnnnnnnnnnnnnnnnnnnnnnnnnnnnnnnnnnnnnnnnnnnnnnnnnnnnnnnnnnnnnnnnnnnnnnnnnnnnnnnnnnnnnnnnnnnnnnnnnnnnnnnnnnnnnnnnnnnnnnnnnnnnnnnnnnnnnnnnnnnnnnnnnnnnnnnnnnnnnnnnnnnnnnnnnnnnnnnnnnnnnnnnnnnnnnnnnnnnnnnnnnnnnnnnnnnnnnnnnnnnnnnnnnnnnnnnnnnnnnnnnnnnnnnnnnnnnnnnnnnnnnnnnnnnnnnnnnnnnnnnnnnnnnnnnnnnnnnnnnnnnnnnnnnnnnnnnnnnnnnnnnnnnnnnnnnnnnnnnnnnnnnnnnnnnnnnnnnnnnnnnnnnnnnnnnnnnnnnnnnnnnnnnnnnnnnnnnnnnnnnnnnnnnnnnnnnnnnnnnnnnnnnnnnnnnnnnnnnnnnnnnnnnnnnnnnnnnnnnnnnnnnnnnnnnnnnnnnnnnnnnnnnnnnnnnnnnnnnnnnnnnnnnnnnnnnnnnnnnnnnnnnnnnnnnnnnnnnnnnnnnnnnnnnnnnnnnnnnnnnnnnnnnnnnnnnnnnnnnnnnnnnnnnnnnnnnnnnnnnnnnnnnnnnnnnnnnnnnnnnnnnnnnnnnnnnnnnnnnnnnnnnnnnnnnnnnnnnnnnnnnnnnnnnnnnnnnnnnnnnnnnnnnnnnnnnnnnnnnnnnnnnnnnnnnnnnnnnnnnnnnnnnnnnnnnnnnnnnnnnnnnnnnnnnnnnnnnnnnnnnnnnnnnnnnnnnnnnnnnnnnnnnnnnnnnnnnnnnnnnnnnnnnnnnnnnnnnnnnnnnnnnnnnnnnnnnnnnnnnnnnnnnnnnnnnnnnnnnnnnnnnnnnnnnnnnnnnnnnnnnnnnnnnnnnnnnnnnnnnnnnnnnnnnnnnnnnnnnnnnnnnnnnnnnnnnnnnnnnnnnnnnnnnnnnnnnnnnnnnnnnnnnnnnnnnnnnnnnnnnnnnnnnnnnnnnnnnnnnnnnnnnnnnnnnnnnnnnnnnnnnnnnnnnnnnnnnnnnnnnnnnnnnnnnnnnnnnnnnnnnnnnnnnnnnnnnnnnnnnnnnnnnnnnnnnnnnnnnnnnnnnnnnnnnnnnnnnnnnnnnnnnnnnnnnnnnnnnnnnnnnnnnnnnnnnnnnnnnnnnnnnnnnnnnnnnnnnnnnnnnnnnnnnnnnnnnnnnnnnnnnnnnnnnnnnnnnnnnnnnnnnnnnnnnnnnnnnnnnnnnnnnnnnnnnnnnnnnnnnnnnnnnnnnnnnnnnnnnnnnnnnnnnnnnnnnnnnnnnnnnnnnnnnnnnnnnnnnnnnnnnnnnnnnnnnnnnnnnnnnnnnnnnnnnnnnnnnnnnnnnnnnnnnnnnnnnnnnnnnnnnnnnnnnnnnnnnnnnnnnnnnnnnnnnnnnnnnnnnnnnnnnnnnnnnnnnnnnnnnnnnnnnnnnnnnnnnnnnnnnnnnnnnnnnnnnnnnnnnnnnnnnnnnnnnnnnnnnnnnnnnnnnnnnnnnnnnnnnnnnnnnnnnnnnnnnnnnnnnnnnnnnnnnnnnnnnnnnnnnnnnnnnnnnnnnnnnnnnnnnnnnnnnnnnnnnnnnnnnnnnnnnnnnnnnnnnnnnnnnnnnnnnnnnnnnnnnnnnnnnnnnnnnnnnnnnnnnnnnnnnnnnnnnnnnnnnnnnnnnnnnnnnnnnnnnnnnnnnnnnnnnnnnnnnnnnnnnnnnnnnnnnnnnnnnnnnnnnnnnnnnnnnnnnnnnnnnnnnnnnnnnnnnnnnnnnnnnnnnnnnnnnnnnnnnnnnnnnnnnnnnnnnnnnnnnnnnnnnnnnnnnnnnnnnnnnnnnnnnnnnnnnnnnnnnnnnnnnnnnnnnnnnnnnnnnnnnnnnnnnnnnnnnnnnnnnnnnnnnnnnnnnnnnnnnnnnnnnnnnnnnnnnnnnnnnnnnnnnnnnnnnnnnnnnnnnnnnnnnnnnnnnnnnnnnnnnnnnnnnnnnnnnnnnnnnnnnnnnnnnnnnnnnnnnnnnnnnnnnnnnnnnnnnnnnnnnnnnnnnnnnnnnnnnnnnnnnnnnnnnnnnnnnnnnnnnnnnnnnnnnnnnnnnnnnnnnnnnnnnnnnnnnnnnnnnnnnnnnnnnnnnnnnnnnnnnnnnnnnnnnnnnnnnnnnnnnnnnnnnnnnnnnnnnnnnnnnnnnnnnnnnnnnnnnnnnnnnnnnnnnnnnnnnnnnnnnnnnnnnnnnnnnnnnnnnnnnnnnnnnnnnnnnnnnnnnnnnnnnnnnnnnnnnnnnnnnnnnnnnnnnnnnnnnnnnnnnnnnnnnnnnnnnnnnnnnnnnnnnnnnnnnnnnnnnnnnnnnnnnnnnnnnnnnnnnnnnnnnnnnnnnnnnnnnnnnnnnnnnnnnnnnnnnnnnnnnnnnnnnnnnnnnnnnnnnnnnnnnnnnnnnnnnnnnnnnnnnnnnnnnnnnnnnnnnnnnnnnnnnnnnnnnnnnnnnnnnnnnnnnnnnnnnnnnnnnnnnnnnnnnnnnnnnnnnnnnnnnnnnnnnnnnnnnnnnnnnnnnnnnnnnnnnnnnnnnnnnnnnnnnnnnnnnnnnnnnnnnnnnnnnnnnnnnnnnnnnnnnnnnnnnnnnnnnnnnnnnnnnnnnnnnnnnnnnnnnnnnnnnnnnnnnnnnnnnnnnnnnnnnnnnnnnnnnnnnnnnnnnnnnnnnnnnnnnnnnnnnnnnnnnnnnnnnnnnnnnnnnnnnnnnnnnnnnnnnnnnnnnnnnnnnnnnnnnnnnnnnnnnnnnnnnnnnnnnnnnnnnnnnnnnnnnnnnnnnnnnnnnnnnnnnnnnnnnnnnnnnnnnnnnnnnnnnnnnnnnnnnnnnnnnnnnnnnnnnnnnnnnnnnnnnnnnnnnnnnnnnnnnnnnnnnnnnnnnnnnnnnnnnnnnnnnnnnnnnnnnnnnnnnnnnnnnnnnnnnnnnnnnnnnnnnnnnnnnnnnnnnnnnnnnnnnnnnnnnnnnnnnnnnnnnnnnnnnnnnnnnnnnnnnnnnnnnnnnnnnnnnnnnnnnnnnnnnnnnnnnnnnnnnnnnnnnnnnnnnnnnnnnnnnnnnnnnnnnnnnnnnnnnnnnnnnnnnnnnnnnnnnnnnnnnnnnnnnnnnnnnnnnnnnnnnnnnnnnnnnnnnnnnnnnnnnnnnnnnnnnnnnnnnnnnnnnnnnnnnnnnnnnnnnnnnnnnnnnnnnnnnnnnnnnnnnnnnnnnnnnnnnnnnnnnnnnnnnnnnnnnnnnnnnnnnnnnnnnnnnnnnnnnnnnnnnnnnnnnnnnnnnnnnnnnnnnnnnnnnnnnnnnnnnnnnnnnnnnnnnnnnnnnnnnnnnnnnnnnnnnnnnnnnnnnnnnnnnnnnnnnnnnnnnnnnnnnnnnnnnnnnnnnnnnnnnnnnnnnnnnnnnnnnnnnnnnnnnnnnnnnnnnnnnnnnnnnnnnnnnnnnnnnnnnnnnnnnnnnnnnnnnnnnnnnnnnnnnnnnnnnnnnnnnnnnnnnnnnnnnnnnnnnnnnnnnnnnnnnnnnnnnnnnnnnnnnnnnnnnnnnnnnnnnnnnnnnnnnnnnnnnnnnnnnnnnnnnnnnnnnnnnnnnnnnnnnnnnnnnnnnnnnnnnnnnnnnnnnnnnnnnnnnnnnnnnnnnnnnnnnnnnnnnnnnnnnnnnnnnnnnnnnnnnnnnnnnnnnnnnnnnnnnnnnnnnnnnnnnnnnnnnnnnnnnnnnnnnnnnnnnnnnnnnnnnnnnnnnnnnnnnnnnnnnnnnnnnnnnnnnnnnnnnnnnnnnnnnnnnnnnnnnnnnnnnnnnnnnnnnnnnnnnnnnnnnnnnnnnnnnnnnnnnnnnnnnnnnnnnnnnnnnnnnnnnnnnnnnnnnnnnnnnnnnnnnnnnnnnnnnnnnnnnnnnnnnnnnnnnnnnnnnnnnnnnnnnnnnnnnnnnnnnnnnnnnnnnnnnnnnnnnnnnnnnnnnnnnnnnnnnnnnnnnnnnnnnnnnnnnnnnnnnnnnnnnnnnnnnnnnnnnnnnnnnnnnnnnnnnnnnnnnnnnnnnnnnnnnnnnnnnnnnnnnnnnnnnnnnnnnnnnnnnnnnnnnnnnnnnnnnnnnnnnnnnnnnnnnnnnnnnnnnnnnnnnnnnnnnnnnnnnnnnnnnnnnnnnnnnnnnnnnnnnnnnnnnnnnnnnnnnnnnnnnnnnnnnnnnnnnnnnnnnnnnnnnnnnnnnnnnnnnnnnnnnnnnnnnnnnnnnnnnnnnnnnnnnnnnnnnnnnnnnnnnnnnnnnnnnnnnnnnnnnnnnnnnnnnnnnnnnnnnnnnnnnnnnnnnnnnnnnnnnnnnnnnnnnnnnnnnnnnnnnnnnnnnnnnnnnnnnnnnnnnnnnnnnnnnnnnnnnnnnnnnnnnnnnnnnnnnnnnnnnnnnnnnnnnnnnnnnnnnnnnnnnnnnnnnnnnnnnnnnnnnnnnnnnnnnnnnnnnnnnnnnnnnnnnnnnnnnnnnnnnnnnnnnnnnnnnnnnnnnnnnnnnnnnnnnnnnnnnnnnnnnnnnnnnnnnnnnnnnnnnnnnnnnnnnnnnnnnnnnnnnnnnnnnnnnnnnnnnnnnnnnnnnnnnnnnnnnnnnnnnnnnnnnnnnnnnnnnnnnnnnnnnnnnnnnnnnnnnnnnnnnnnnnnnnnnnnnnnnnnnnnnnnnnnnnnnnnnnnnnnnnnnnnnnnnnnnnnnnnnnnnnnnnnnnnnnnnnnnnnnnnnnnnnnnnnnnnnnnnnnnnnnnnnnnnnnnnnnnnnnnnnnnnnnnnnnnnnnnnnnnnnnnnnnnnnnnnnnnnnnnnnnnnnnnnnnnnnnnnnnnnnnnnnnnnnnnnnnnnnnnnnnnnnnnnnnnnnnnnnnnnnnnnnnnnnnnnnnnnnnnnnnnnnnnnnnnnnnnnnnnnnnnnnnnnnnnnnnnnnnnnnnnnnnnnnnnnnnnnnnnnnnnnnnnnnnnnnnnnnnnnnnnnnnnnnnnnnnnnnnnnnnnnnnnnnnnnnnnnnnnnnnnnnnnnnnnnnnnnnnnnnnnnnnnnnnnnnnnnnnnnnnnnnnnnnnnnnnnnnnnnnnnnnnnnnnnnnnnnnnnnnnnnnnnnnnnnnnnnnnnnnnnnnnnnnnnnnnnnnnnnnnnnnnnnnnnnnnnnnnnnnnnnnnnnnnnnnnnnnnnnnnnnnnnnnnnnnnnnnnnnnnnnnnnnnnnnnnnnnnnnnnnnnnnnnnnnnnnnnnnnnnnnnnnnnnnnnnnnnnnnnnnnnnnnnnnnnnnnnnnnnnnnnnnnnnnnnnnnnnnnnnnnnnnnnnnnnnnnnnnnnnnnnnnnnnnnnnnnnnnnnnnnnnnnnnnnnnnnnnnnnnnnnnnnnnnnnnnnnnnnnnnnnnnnnnnnnnnnnnnnnnnnnnnnnnnnnnnnnnnnnnnnnnnnnnnnnnnnnnnnnnnnnnnnnnnnnnnnnnnnnnnnnnnnnnnnnnnnnnnnnnnnnnnnnnnnnnnnnnnnnnnnnnnnnnnnnnnnnnnnnnnnnnnnnnnnnnnnnnnnnnnnnnnnnnnnnnnnnnnnnnnnnnnnnnnnnnnnnnnnnnnnnnnnnnnnnnnnnnnnnnnnnnnnnnnnnnnnnnnnnnnnnnnnnnnnnnnnnnnnnnnnnnnnnnnnnnnnnnnnnnnnnnnnnnnnnnnnnnnnnnnnnnnnnnnnnnnnnnnnnnnnnnnnnnnnnnnnnnnnnnnnnnnnnnnnnnnnnnnnnnnnnnnnnnnnnnnnnnnnnnnnnnnnnnnnnnnnnnnnnnnnnnnnnnnnnnnnnnnnnnnnnnnnnnnnnnnnnnnnnnnnnnnnnnnnnnnnnnnnnnnnnnnnnnnnnnnnnnnnnnnnnnnnnnnnnnnnnnnnnnnnnnnnnnnnnnnnnnnnnnnnnnnnnnnnnnnnnnnnnnnnnnnnnnnnnnnnnnnnnnnnnnnnnnnnnnnnnnnnnnnnnnnnnnnnnnnnnnnnnnnnnnnnnnnnnnnnnnnnnnnnnnnnnnnnnnnnnnnnnnnnnnnnnnnnnnnnnnnnnnnnnnnnnnnnnnnnnnnnnnnnnnnnnnnnnnnnnnnnnnnnnnnnnnnnnnnnnnnnnnnnnnnnnnnnnnnnnnnnnnnnnnnnnnnnnnnnnnnnnnnnnnnnnnnnnnnnnnnnnnnnnnnnnnnnnnnnnnnnnnnnnnnnnnnnnnnnnnnnnnnnnnnnnnnnnnnnnnnnnnnnnnnnnnnnnnnnnnnnnnnnnnnnnnnnnnnnnnnnnnnnnnnnnnnnnnnnnnnnnnnnnnnnnnnnnnnnnnnnnnnnnnnnnnnnnnnnnnnnnnnnnnnnnnnnnnnnnnnnnnnnnnnnnnnnnnnnnnnnnnnnnnnnnnnnnnnnnnnnnnnnnnnnnnnnnnnnnnnnnnnnnnnnnnnnnnnnnnnnnnnnnnnnnnnnnnnnnnnnnnnnnnnnnnnnnnnnnnnnnnnnnnnnnnnnnnnnnnnnnnnnnnnnnnnnnnnnnnnnnnnnnnnnnnnnnnnnnnnnnnnnnnnnnnnnnnnnnnnnnnnnnnnnnnnnnnnnnnnnnnnnnnnnnnnnnnnnnnnnnnnnnnnnnnnnnnnnnnnnnnnnnnnnnnnnnnnnnnnnnnnnnnnnnnnnnnnnnnnnnnnnnnnnnnnnnnnnnnnnnnnnnnnnnnnnnnnnnnnnnnnnnnnnnnnnnnnnnnnnnnnnnnnnnnnnnnnnnnnnnnnnnnnnnnnnnnnnnnnnnnnnnnnnnnnnnnnnnnnnnnnnnnnnnnnnnnnnnnnnnnnnnnnnnnnnnnnnnnnnnnnnnnnnnnnnnnnnnnnnnnnnnnnnnnnnnnnnnnnnnnnnnnnnnnnnnnnnnnnnnnnnnnnnnnnnnnnnnnnnnnnnnnnnnnnnnnnnnnnnnnnnnnnnnnnnnnnnnnnnnnnnnnnnnnnnnnnnnnnnnnnnnnnnnnnnnnnnnnnnnnnnnnnnnnnnnnnnnnnnnnnnnnnnnnnnnnnnnnnnnnnnnnnnnnnnnnnnnnnnnnnnnnnnnnnnnnnnnnnnnnnnnnnnnnnnnnnnnnnnnnnnnnnnnnnnnnnnnnnnnnnnnnnnnnnnnnnnnnnnnnnnnnnnnnnnnnnnnnnnnnnnnnnnnnnnnnnnnnnnnnnnnnnnnnnnnnnnnnnnnnnnnnnnnnnnnnnnnnnnnnnnnnnnnnnnnnnnnnnnnnnnnnnnnnnnnnnnnnnnnnnnnnnnnnnnnnnnnnnnnnnnnnnnnnnnnnnnnnnnnnnnnnnnnnnnnnnnnnnnnnnnnnnnnnnnnnnnnnnnnnnnnnnnnnnnnnnnnnnnnnnnnnnnnnnnnnnnnnnnnnnnnnnnnnnnnnnnnnnnnnnnnnnnnnnnnnnnnnnnnnnnnnnnnnnnnnnnnnnnnnnnnnnnnnnnnnnnnnnnnnnnnnnnnnnnnnnnnnnnnnnnnnnnnnnnnnnnnnnnnnnnnnnnnnnnnnnnnnnnnnnnnnnnnnnnnnnnnnnnnnnnnnnnnnnnnnnnnnnnnnnnnnnnnnnnnnnnnnnnnnnnnnnnnnnnnnnnnnnnnnnnnnnnnnnnnnnnnnnnnnnnnnnnnnnnnnnnnnnnnnnnnnnnnnnnnnnnnnnnnnnnnnnnnnnnnnnnnnnnnnnnnnnnnnnnnnnnnnnnnnnnnnnnnnnnnnnnnnnnnnnnnnnnnnnnnnnnnnnnnnnnnnnnnnnnnnnnnnnnnnnnnnnnnnnnnnnnnnnnnnnnnnnnnnnnnnnnnnnnnnnnnnnnnnnnnnnnnnnnnnnnnnnnnnnnnnnnnnnnnnnnnnnnnnnnnnnnnnnnnnnnnnnnnnnnnnnnnnnnnnnnnnnnnnnnnnnnnnnnnnnnnnnnnnnnnnnnnnnnnnnnnnnnnnnnnnnnnnnnnnnnnnnnnnnnnnnnnnnnnnnnnnnnnnnnnnnnnnnnnnnnnnnnnnnnnnnnnnnnnnnnnnnnnnnnnnnnnnnnnnnnnnnnnnnnnnnnnnnnnnnnnnnnnnnnnnnnnnnnnnnnnnnnnnnnnnnnnnnnnnnnnnnnnnnnnnnnnnnnnnnnnnnnnnnnnnnnnnnnnnnnnnnnnnnnnnnnnnnnnnnnnnnnnnnnnnnnnnnnnnnnnnnnnnnnnnnnnnnnnnnnnnnnnnnnnnnnnnnnnnnnnnnnnnnnnnnnnnnnnnnnnnnnnnnnnnnnnnnnnnnnnnnnnnnnnnnnnnnnnnnnnnnnnnnnnnnnnnnnnnnnnnnnnnnnnnnnnnnnnnnnnnnnnnnnnnnnnnnnnnnnnnnnnnnnnnnnnnnnnnnnnnnnnnnnnnnnnnnnnnnnnnnnnnnnnnnnnnnnnnnnnnnnnnnnnnnnnnnnnnnnnnnnnnnnnnnnnnnnnnnnnnnnnnnnnnnnnnnnnnnnnnnnnnnnnnnnnnnnnnnnnnnnnnnnnnnnnnnnnnnnnnnnnnnnnnnnnnnnnnnnnnnnnnnnnnnnnnnnnnnnnnnnnnnnnnnnnnnnnnnnnnnnnnnnnnnnnnnnnnnnnnnnnnnnnnnnnnnnnnnnnnnnnnnnnnnnnnnnnnnnnnnnnnnnnnnnnnnnnnnnnnnnnnnnnnnnnnnnnnnnnnnnnnnnnnnnnnnnnnnnnnnnnnnnnnnnnnnnnnnnnnnnnnnnnnnnnnnnnnnnnnnnnnnnnnnnnnnnnnnnnnnnnnnnnnnnnnnnnnnnnnnnnnnnnnnnnnnnnnnnnnnnnnnnnnnnnnnnnnnnnnnnnnnnnnnnnnnnnnnnnnnnnnnnnnnnnnnnnnnnnnnnnnnnnnnnnnnnnnnnnnnnnnnnnnnnnnnnnnnnnnnnnnnnnnnnnnnnnnnnnnnnnnnnnnnnnnnnnnnnnnnnnnnnnnnnnnnnnnnnnnnnnnnnnnnnnnnnnnnnnnnnnnnnnnnnnnnnnnnnnnnnnnnnnnnnnnnnnnnnnnnnnnnnnnnnnnnnnnnnnnnnnnnnnnnnnnnnnnnnnnnnnnnnnnnnnnnnnnnnnnnnnnnnnnnnnnnnnnnnnnnnnnnnnnnnnnnnnnnnnnnnnnnnnnnnnnnnnnnnnnnnnnnnnnnnnnnnnnnnnnnnnnnnnnnnnnnnnnnnnnnnnnnnnnnnnnnnnnnnnnnnnnnnnnnnnnnnnnnnnnnnnnnnnnnnnnnnnnnnnnnnnnnnnnnnnnnnnnnnnnnnnnnnnnnnnnnnnnnnnnnnnnnnnnnnnnnnnnnnnnnnnnnnnnnnnnnnnnnnnnnnnnnnnnnnnnnnnnnnnnnnnnnnnnnnnnnnnnnnnnnnnnnnnnnnnnnnnnnnnnnnnnnnnnnnnnnnnnnnnnnnnnnnnnnnnnnnnnnnnnnnnnnnnnnnnnnnnnnnnnnnnnnnnnnnnnnnnnnnnnnnnnnnnnnnnnnnnnnnnnnnnnnnnnnnnnnnnnnnnnnnnnnnnnnnnnnnnnnnnnnnnnnnnnnnnnnnnnnnnnnnnnnnnnnnnnnnnnnnnnnnnnnnnnnnnnnnnnnnnnnnnnnnnnnnnnnnnnnnnnnnnnnnnnnnnnnnnnnnnnnnnnnnnnnnnnnnnnnnnnnnnnnnnnnnnnnnnnnnnnnnnnnnnnnnnnnnnnnnnnnnnnnnnnnnnnnnnnnnnnnnnnnnnnnnnnnnnnnnnnnnnnnnnnnnnnnnnnnnnnnnnnnnnnnnnnnnnnnnnnnnnnnnnnnnnnnnnnnnnnnnnnnnnnnnnnnnnnnnnnnnnnnnnnnnnnnnnnnnnnnnnnnnnnnnnnnnnnnnnnnnnnnnnnnnnnnnnnnnnnnnnnnnnnnnnnnnnnnnnnnnnnnnnnnnnnnnnnnnnnnnnnnnnnnnnnnnnnnnnnnnnnnnnnnnnnnnnnnnnnnnnnnnnnnnnnnnnnnnnnnnnnnnnnnnnnnnnnnnnnnnnnnnnnnnnnnnnnnnnnnnnnnnnnnnnnnnnnnnnnnnnnnnnnnnnnnnnnnnnnnnnnnnnnnnnnnnnnnnnnnnnnnnnnnnnnnnnnnnnnnnnnnnnnnnnnnnnnnnnnnnnnnnnnnnnnnnnnnnnnnnnnnnnnnnnnnnnnnnnnnnnnnnnnnnnnnnnnnnnnnnnnnnnnnnnnnnnnnnnnnnnnnnnnnnnnnnnnnnnnnnnnnnnnnnnnnnnnnnnnnnnnnnnnnnnnnnnnnnnnnnnnnnnnnnnnnnnnnnnnnnnnnnnnnnnnnnnnnnnnnnnnnnnnnnnnnnnnnnnnnnnnnnnnnnnnnnnnnnnnnnnnnnnnnnnnnnnnnnnnnnnnnnnnnnnnnnnnnnnnnnnnnnnnnnnnnnnnnnnnnnnnnnnnnnnnnnnnnnnnnnnnnnnnnnnnnnnnnnnnnnnnnnnnnnnnnnnnnnnnnnnnnnnnnnnnnnnnnnnnnnnnnnnnnnnnnnnnnnnnnnnnnnnnnnnnnnnnnnnnnnnnnnnnnnnnnnnnnnnnnnnnnnnnnnnnnnnnnnnnnnnnnnnnnnnnnnnnnnnnnnnnnnnnnnnnnnnnnnnnnnnnnnnnnnnnnnnnnnnnnnnnnnnnnnnnnnnnnnnnnnnnnnnnnnnnnnnnnnnnnnnnnnnnnnnnnnnnnnnnnnnnnnnnnnnnnnnnnnnnnnnnnnnnnnnnnnnnnnnnnnnnnnnnnnnnnnnnnnnnnnnnnnnnnnnnnnnnnnnnnnnnnnnnnnnnnnnnnnnnnnnnnnnnnnnnnnnnnnnnnnnnnnnnnnnnnnnnnnnnnnnnnnnnnnnnnnnnnnnnnnnnnnnnnnnnnnnnnnnnnnnnnnnnnnnnnnnnnnnnnnnnnnnnnnnnnnnnnnnnnnnnnnnnnnnnnnnnnnnnnnnnnnnnnnnnnnnnnnnnnnnnnnnnnnnnnnnnnnnnnnnnnnnnnnnnnnnnnnnnnnnnnnnnnnnnnnnnnnnnnnnnnnnnnnnnnnnnnnnnnnnnnnnnnnnnnnnnnnnnnnnnnnnnnnnnnnnnnnnnnnnnnnnnnnnnnnnnnnnnnnnnnnnnnnnnnnnnnnnnnnnnnnnnnnnnnnnnnnnnnnnnnnnnnnnnnnnnnnnnnnnnnnnnnnnnnnnnnnnnnnnnnnnnnnnnnnnnnnnnnnnnnnnnnnnnnnnnnnnnnnnnnnnnnnnnnnnnnnnnnnnnnnnnnnnnnnnnnnnnnnnnnnnnnnnnnnnnnnnnnnnnnnnnnnnnnnnnnnnnnnnnnnnnnnnnnnnnnnnnnnnnnnnnnnnnnnnnnnnnnnnnnnnnnnnnnnnnnnnnnnnnnnnnnnnnnnnnnnnnnnnnnnnnnnnnnnnnnnnnnnnnnnnnnnnnnnnnnnnnnnnnnnnnnnnnnnnnnnnnnnnnnnnnnnnnnnnnnnnnnnnnnnnnnnnnnnnnnnnnnnnnnnnnnnnnnnnnnnnnnnnnnnnnnnnnnnnnnnnnnnnnnnnnnnnnnnnnnnnnnnnnnnnnnnnnnnnnnnnnnnnnnnnnnnnnnnnnnnnnnnnnnnnnnnnnnnnnnnnnnnnnnnnnnnnnnnnnnnnnnnnnnnnnnnnnnnnnnnnnnnnnnnnnnnnnnnnnnnnnnnnnnnnnnnnnnnnnnnnnnnnnnnnnnnnnnnnnnnnnnnnnnnnnnnnnnnnnnnnnnnnnnnnnnnnnnnnnnnnnnnnnnnnnnnnnnnnnnnnnnnnnnnnnnnnnnnnnnnnnnnnnnnnnnnnnnnnnnnnnnnnnnnnnnnnnnnnnnnnnnnnnnnnnnnnnnnnnnnnnnnnnnnnnnnnnnnnnnnnnnnnnnnnnnnnnnnnnnnnnnnnnnnnnnnnnnnnnnnnnnnnnnnnnnnnnnnnnnnnnnnnnnnnnnnnnnnnnnnnnnnnnnnnnnnnnnnnnnnnnnnnnnnnnnnnnnnnnnnnnnnnnnnnnnnnnnnnnnnnnnnnnnnnnnnnnnnnnnnnnnnnnnnnnnnnnnnnnnnnnnnnnnnnnnnnnnnnnnnnnnnnnnnnnnnnnnnnnnnnnnnnnnnnnnnnnnnnnnnnnnnnnnnnnnnnnnnnnnnnnnnnnnnnnnnnnnnnnnnnnnnnnnnnnnnnnnnnnnnnnnnnnnnnnnnnnnnnnnnnnnnnnnnnnnnnnnnnnnnnnnnnnnnnnnnnnnnnnnnnnnnnnnnnnnnnnnnnnnnnnnnnnnnnnnnnnnnnnnnnnnnnnnnnnnnnnnnnnnnnnnnnnnnnnnnnnnnnnnnnnnnnnnnnnnnnnnnnnnnnnnnnnnnnnnnnnnnnnnnnnnnnnnnnnnnnnnnnnnnnnnnnnnnnnnnnnnnnnnnnnnnnnnnnnnnnnnnnnnnnnnnnnnnnnnnnnnnnnnnnnnnnnnnnnnnnnnnnnnnnnnnnnnnnnnnnnnnnnnnnnnnnnnnnnnnnnnnnnnnnnnnnnnnnnnnnnnnnnnnnnnnnnnnnnnnnnnnnnnnnnnnnnnnnnnnnnnnnnnnnnnnnnnnnnnnnnnnnnnnnnnnnnnnnnnnnnnnnnnnnnnnnnnnnnnnnnnnnnnnnnnnnnnnnnnnnnnnnnnnnnnnnnnnnnnnnnnnnnnnnnnnnnnnnnnnnnnnnnnnnnnnnnnnnnnnnnnnnnnnnnnnnnnnnnnnnnnnnnnnnnnnnnnnnnnnnnnnnnnnnnnnnnnnnnnnnnnnnnnnnnnnnnnnnnnnnnnnnnnnnnnnnnnnnnnnnnnnnnnnnnnnnnnnnnnnnnnnnnnnnnnnnnnnnnnnnnnnnnnnnnnnnnnnnnnnnnnnnnnnnnnnnnnnnnnnnnnnnnnnnnnnnnnnnnnnnnnnnnnnnnnnnnnnnnnnnnnnnnnnnnnnnnnnnnnnnnnnnnnnnnnnnnnnnnnnnnnnnnnnnnnnnnnnnnnnnnnnnnnnnnnnnnnnnnnnnnnnnnnnnnnnnnnnnnnnnnnnnnnnnnnnnnnnnnnnnnnnnnnnnnnnnnnnnnnnnnnnnnnnnnnnnnnnnnnnnnnnnnnnnnnnnnnnnnnnnnnnnnnnnnnnnnnnnnnnnnnnnnnnnnnnnnnnnnnnnnnnnnnnnnnnnnnnnnnnnnnnnnnnnnnnnnnnnnnnnnnnnnnnnnnnnnnnnnnnnnnnnnnnnnnnnnnnnnnnnnnnnnnnnnnnnnnnnnnnnnnnnnnnnnnnnnnnnnnnnnnnnnnnnnnnnnnnnnnnnnnnnnnnnnnnnnnnnnnnnnnnnnnnnnnnnnnnnnnnnnnnnnnnnnnnnnnnnnnnnnnnnnnnnnnnnnnnnnnnnnnnnnnnnnnnnnnnnnnnnnnnnnnnnnnnnnnnnnnnnnnnnnnnnnnnnnnnnnnnnnnnnnnnnnnnnnnnnnnnnnnnnnnnnnnnnnnnnnnnnnnnnnnnnnnnnnnnnnnnnnnnnnnnnnnnnnnnnnnnnnnnnnnnnnnnnnnnnnnnnnnnnnnnnnnnnnnnnnnnnnnnnnnnnnnnnnnnnnnnnnnnnnnnnnnnnnnnnnnnnnnnnnnnnnnnnnnnnnnnnnnnnnnnnnnnnnnnnnnnnnnnnnnnnnnnnnnnnnnnnnnnnnnnnnnnnnnnnnnnnnnnnnnnnnnnnnnnnnnnnnnnnnnnnnnnnnnnnnnnnnnnnnnnnnnnnnnnnnnnnnnnnnnnnnnnnnnnnnnnnnnnnnnnnnnnnnnnnnnnnnnnnnnnnnnnnnnnnnnnnnnnnnnnnnnnnnnnnnnnnnnnnnnnnnnnnnnnnnnnnnnnnnnnnnnnnnnnnnnnnnnnnnnnnnnnnnnnnnnnnnnnnnnnnnnnnnnnnnnnnnnnnnnnnnnnnnnnnnnnnnnnnnnnnnnnnnnnnnnnnnnnnnnnnnnnnnnnnnnnnnnnnnnnnnnnnnnnnnnnnnnnnnnnnnnnnnnnnnnnnnnnnnnnnnnnnnnnnnnnnnnnnnnnnnnnnnnnnnnnnnnnnnnnnnnnnnnnnnnnnnnnnnnnnnnnnnnnnnnnnnnnnnnnnnnnnnnnnnnnnnnnnnnnnnnnnnnnnnnnnnnnnnnnnnnnnnnnnnnnnnnnnnnnnnnnnnnnnnnnnnnnnnnnnnnnnnnnnnnnnnnnnnnnnnnnnnnnnnnnnnnnnnnnnnnnnnnnnnnnnnnnnnnnnnnnnnnnnnnnnnnnnnnnnnnnnnnnnnnnnnnnnnnnnnnnnnnnnnnnnnnnnnnnnnnnnnnnnnnnnnnnnnnnnnnnnnnnnnnnnnnnnnnnnnnnnnnnnnnnnnnnnnnnnnnnnnnnnnnnnnnnnnnnnnnnnnnnnnnnnnnnnnnnnnnnnnnnnnnnnnnnnnnnnnnnnnnnnnnnnnnnnnnnnnnnnnnnnnnnnnnnnnnnnnnnnnnnnnnnnnnnnnnnnnnnnnnnnnnnnnnnnnnnnnnnnnnnnnnnnnnnnnnnnnnnnnnnnnnnnnnnnnnnnnnnnnnnnnnnnnnnnnnnnnnnnnnnnnnnnnnnnnnnnnnnnnnnnnnnnnnnnnnnnnnnnnnnnnnnnnnnnnnnnnnnnnnnnnnnnnnnnnnnnnnnnnnnnnnnnnnnnnnnnnnnnnnnnnnnnnnnnnnnnnnnnnnnnnnnnnnnnnnnnnnnnnnnnnnnnnnnnnnnnnnnnnnnnnnnnnnnnnnnnnnnnnnnnnnnnnnnnnnnnnnnnnnnnnnnnnnnnnnnnnnnnnnnnnnnnnnnnnnnnnnnnnnnnnnnnnnnnnnnnnnnnnnnnnnnnnnnnnnnnnnnnnnnnnnnnnnnnnnnnnnnnnnnnnnnnnnnnnnnnnnnnnnnnnnnnnnnnnnnnnnnnnnnnnnnnnnnnnnnnnnnnnnnnnnnnnnnnnnnnnnnnnnnnnnnnnnnnnnnnnnnnnnnnnnnnnnnnnnnnnnnnnnnnnnnnnnnnnnnnnnnnnnnnnnnnnnnnnnnnnnnnnnnnnnnnnnnnnnnnnnnnnnnnnnnnnnnnnnnnnnnnnnnnnnnnnnnnnnnnnnnnnnnnnnnnnnnnnnnnnnnnnnnnnnnnnnnnnnnnnnnnnnnnnnnnnnnnnnnnnnnnnnnnnnnnnnnnnnnnnnnnnnnnnnnnnnnnnnnnnnnnnnnnnnnnnnnnnnnnnnnnnnnnnnnnnnnnnnnnnnnnnnnnnnnnnnnnnnnnnnnnnnnnnnnnnnnnnnnnnnnnnnnnnnnnnnnnnnnnnnnnnnnnnnnnnnnnnnnnnnnnnnnnnnnnnnnnnnnnnnnnnnnnnnnnnnnnnnnnnnnnnnnnnnnnnnnnnnnnnnnnnnnnnnnnnnnnnnnnnnnnnnnnnnnnnnnnnnnnnnnnnnnnnnnnnnnnnnnnnnnnnnnnnnnnnnnnnnnnnnnnnnnnnnnnnnnnnnnnnnnnnnnnnnnnnnnnnnnnnnnnnnnnnnnnnnnnnnnnnnnnnnnnnnnnnnnnnnnnnnnnnnnnnnnnnnnnnnnnnnnnnnnnnnnnnnnnnnnnnnnnnnnnnnnnnnnnnnnnnnnnnnnnnnnnnnnnnnnnnnnnnnnnnnnnnnnnnnnnnnnnnnnnnnnnnnnnnnnnnnnnnnnnnnnnnnnnnnnnnnnnnnnnnnnnnnnnnnnnnnnnnnnnnnnnnnnnnnnnnnnnnnnnnnnnnnnnnnnnnnnnnnnnnnnnnnnnnnnnnnnnnnnnnnnnnnnnnnnnnnnnnnnnnnnnnnnnnnnnnnnnnnnnnnnnnnnnnnnnnnnnnnnnnnnnnnnnnnnnnnnnnnnnnnnnnnnnnnnnnnnnnnnnnnnnnnnnnnnnnnnnnnnnnnnnnnnnnnnnnnnnnnnnnnnnnnnnnnnnnnnnnnnnnnnnnnnnnnnnnnnnnnnnnnnnnnnnnnnnnnnnnnnnnnnnnnnnnnnnnnnnnnnnnnnnnnnnnnnnnnnnnnnnnnnnnnnnnnnnnnnnnnnnnnnnnnnnnnnnnnnnnnnnnnnnnnnnnnnnnnnnnnnnnnnnnnnnnnnnnnnnnnnnnnnnnnnnnnnnnnnnnnnnnnnnnnnnnnnnnnnnnnnnnnnnnnnnnnnnnnnnnnnnnnnnnnnnnnnnnnnnnnnnnnnnnnnnnnnnnnnnnnnnnnnnnnnnnnnnnnnnnnnnnnnnnnnnnnnnnnnnnnnnnnnnnnnnnnnnnnnnnnnnnnnnnnnnnnnnnnnnnnnnnnnnnnnnnnnnnnnnnnnnnnnnnnnnnnnnnnnnnnnnnnnnnnnnnnnnnnnnnnnnnnnnnnnnnnnnnnnnnnnnnnnnnnnnnnnnnnnnnnnnnnnnnnnnnnnnnnnnnnnnnnnnnnnnnnnnnnnnnnnnnnnnnnnnnnnnnnnnnnnnnnnnnnnnnnnnnnnnnnnnnnnnnnnnnnnnnnnnnnnnnnnnnnnnnnnnnnnnnnnnnnnnnnnnnnnnnnnnnnnnnnnnnnnnnnnnnnnnnnnnnnnnnnnnnnnnnnnnnnnnnnnnnnnnnnnnnnnnnnnnnnnnnnnnnnnnnnnnnnnnnnnnnnnnnnnnnnnnnnnnnnnnnnnnnnnnnnnnnnnnnnnnnnnnnnnnnnnnnnnnnnnnnnnnnnnnnnnnnnnnnnnnnnnnnnnnnnnnnnnnnnnnnnnnnnnnnnnnnnnnnnnnnnnnnnnnnnnnnnnnnnnnnnnnnnnnnnnnnnnnnnnnnnnnnnnnnnnnnnnnnnnnnnnnnnnnnnnnnnnnnnnnnnnnnnnnnnnnnnnnnnnnnnnnnnnnnnnnnnnnnnnnnnnnnnnnnnnnnnnnnnnnnnnnnnnnnnnnnnnnnnnnnnnnnnnnnnnnnnnnnnnnnnnnnnnnnnnnnnnnnnnnnnnnnnnnnnnnnnnnnnnnnnnnnnnnnnnnnnnnnnnnnnnnnnnnnnnnnnnnnnnnnnnnnnnnnnnnnnnnnnnnnnnnnnnnnnnnnnnnnnnnnnnnnnnnnnnnnnnnnnnnnnnnnnnnnnnnnnnnnnnnnnnnnnnnnnnnnnnnnnnnnnnnnnnnnnnnnnnnnnnnnnnnnnnnnnnnnnnnnnnnnnnnnnnnnnnnnnnnnnnnnnnnnnnnnnnnnnnnnnnnnnnnnnnnnnnnnnnnnnnnnnnnnnnnnnnnnnnnnnnnnnnnnnnnnnnnnnnnnnnnnnnnnnnnnnnnnnnnnnnnnnnnnnnnnnnnnnnnnnnnnnnnnnnnnnnnnnnnnnnnnnnnnnnnnnnnnnnnnnnnnnnnnnnnnnnnnnnnnnnnnnnnnnnnnnnnnnnnnnnnnnnnnnnnnnnnnnnnnnnnnnnnnnnnnnnnnnnnnnnnnnnnnnnnnnnnnnnnnnnnnnnnnnnnnnnnnnnnnnnnnnnnnnnnnnnnnnnnnnnnnnnnnnnnnnnnnnnnnnnnnnnnnnnnnnnnnnnnnnnnnnnnnnnnnnnnnnnnnnnnnnnnnnnnnnnnnnnnnnnnnnnnnnnnnnnnnnnnnnnnnnnnnnnnnnnnnnnnnnnnnnnnnnnnnnnnnnnnnnnnnnnnnnnnnnnnnnnnnnnnnnnnnnnnnnnnnnnnnnnnnnnnnnnnnnnnnnnnnnnnnnnnnnnnnnnnnnnnnnnnnnnnnnnnnnnnnnnnnnnnnnnnnnnnnnnnnnnnnnnnnnnnnnnnnnnnnnnnnnnnnnnnnnnnnnnnnnnnnnnnnnnnnnnnnnnnnnnnnnnnnnnnnnnnnnnnnnnnnnnnnnnnnnnnnnnnnnnnnnnnnnnnnnnnnnnnnnnnnnnnnnnnnnnnnnnnnnnnnnnnnnnnnnnnnnnnnnnnnnnnnnnnnnnnnnnnnnnnnnnnnnnnnnnnnnnnnnnnnnnnnnnnnnnnnnnnnnnnnnnnnnnnnnnnnnnnnnnnnnnnnnnnnnnnnnnnnnnnnnnnnnnnnnnnnnnnnnnnnnnnnnnnnnnnnnnnnnnnnnnnnnnnnnnnnnnnnnnnnnnnnnnnnnnnnnnnnnnnnnnnnnnnnnnnnnnnnnnnnnnnnnnnnnnnnnnnnnnnnnnnnnnnnnnnnnnnnnnnnnnnnnnnnnnnnnnnnnnnnnnnnnnnnnnnnnnnnnnnnnnnnnnnnnnnnnnnnnnnnnnnnnnnnnnnnnnnnnnnnnnnnnnnnnnnnnnnnnnnnnnnnnnnnnnnnnnnnnnnnnnnnnnnnnnnnnnnnnnnnnnnnnnnnnnnnnnnnnnnnnnnnnnnnnnnnnnnnnnnnnnnnnnnnnnnnnnnnnnnnnnnnnnnnnnnnnnnnnnnnnnnnnnnnnnnnnnnnnnnnnnnnnnnnnnnnnnnnnnnnnnnnnnnnnnnnnnnnnnnnnnnnnnnnnnnnnnnnnnnnnnnnnnnnnnnnnnnnnnnnnnnnnnnnnnnnnnnnnnnnnnnnnnnnnnnnnnnnnnnnnnnnnnnnnnnnnnnnnnnnnnnnnnnnnnnnnnnnnnnnnnnnnnnnnnnnnnnnnnnnnnnnnnnnnnnnnnnnnnnnnnnnnnnnnnnnnnnnnnnnnnnnnnnnnnnnnnnnnnnnnnnnnnnnnnnnnnnnnnnnnnnnnnnnnnnnnnnnnnnnnnnnnnnnnnnnnnnnnnnnnnnnnnnnnnnnnnnnnnnnnnnnnnnnnnnnnnnnnnnnnnnnnnnnnnnnnnnnnnnnnnnnnnnnnnnnnnnnnnnnnnnnnnnnnnnnnnnnnnnnnnnnnnnnnnnnnnnnnnnnnnnnnnnnnnnnnnnnnnnnnnnnnnnnnnnnnnnnnnnnnnnnnnnnnnnnnnnnnnnnnnnnnnnnnnnnnnnnnnnnnnnnnnnnnnnnnnnnnnnnnnnnnnnnnnnnnnnnnnnnnnnnnnnnnnnnnnnnnnnnnnnnnnnnnnnnnnnnnnnnnnnnnnnnnnnnnnnnnnnnnnnnnnnnnnnnnnnnnnnnnnnnnnnnnnnnnnnnnnnnnnnnnnnnnnnnnnnnnnnnnnnnnnnnnnnnnnnnnnnnnnnnnnnnnnnnnnnnnnnnnnnnnnnnnnnnnnnnnnnnnnnnnnnnnnnnnnnnnnnnnnnnnnnnnnnnnnnnnnnnnnnnnnnnnnnnnnnnnnnnnnnnnnnnnnnnnnnnnnnnnnnnnnnnnnnnnnnnnnnnnnnnnnnnnnnnnnnnnnnnnnnnnnnnnnnnnnnnnnnnnnnnnnnnnnnnnnnnnnnnnnnnnnnnnnnnnnnnnnnnnnnnnnnnnnnnnnnnnnnnnnnnnnnnnnnnnnnnnnnnnnnnnnnnnnnnnnnnnnnnnnnnnnnnnnnnnnnnnnnnnnnnnnnnnnnnnnnnnnnnnnnnnnnnnnnnnnnnnnnnnnnnnnnnnnnnnnnnnnnnnnnnnnnnnnnnnnnnnnnnnnnnnnnnnnnnnnnnnnnnnnnnnnnnnnnnnnnnnnnnnnnnnnnnnnnnnnnnnnnnnnnnnnnnnnnnnnnnnnnnnnnnnnnnnnnnnnnnnnnnnnnnnnnnnnnnnnnnnnnnnnnnnnnnnnnnnnnnnnnnnnnnnnnnnnnnnnnnnnnnnnnnnnnnnnnnnnnnnnnnnnnnnnnnnnnnnnnnnnnnnnnnnnnnnnnnnnnnnnnnnnnnnnnnnnnnnnnnnnnnnnnnnnnnnnnnnnnnnnnnnnnnnnnnnnnnnnnnnnnnnnnnnnnnnnnnnnnnnnnnnnnnnnnnnnnnnnnnnnnnnnnnnnnnnnnnnnnnnnnnnnnnnnnnnnnnnnnnnnnnnnnnnnnnnnnnnnnnnnnnnnnnnnnnnnnnnnnnnnnnnnnnnnnnnnnnnnnnnnnnnnnnnnnnnnnnnnnnnnnnnnnnnnnnnnnnnnnnnnnnnnnnnnnnnnnnnnnnnnnnnnnnnnnnnnnnnnnnnnnnnnnnnnnnnnnnnnnnnnnnnnnnnnnnnnnnnnnnnnnnnnnnnnnnnnnnnnnnnnnnnnnnnnnnnnnnnnnnnnnnnnnnnnnnnnnnnnnnnnnnnnnnnnnnnnnnnnnnnnnnnnnnnnnnnnnnnnnnnnnnnnnnnnnnnnnnnnnnnnnnnnnnnnnnnnnnnnnnnnnnnnnnnnnnnnnnnnnnnnnnnnnnnnnnnnnnnnnnnnnnnnnnnnnnnnnnnnnnnnnnnnnnnnnnnnnnnnnnnnnnnnnnnnnnnnnnnnnnnnnnnnnnnnnnnnnnnnnnnnnnnnnnnnnnnnnnnnnnnnnnnnnnnnnnnnnnnnnnnnnnnnnnnnnnnnnnnnnnnnnnnnnnnnnnnnnnnnnnnnnnnnnnnnnnnnnnnnnnnnnnnnnnnnnnnnnnnnnnnnnnnnnnnnnnnnnnnnnnnnnnnnnnnnnnnnnnnnnnnnnnnnnnnnnnnnnnnnnnnnnnnnnnnnnnnnnnnnnnnnnnnnnnnnnnnnnnnnnnnnnnnnnnnnnnnnnnnnnnnnnnnnnnnnnnnnnnnnnnnnnnnnnnnnnnnnnnnnnnnnnnnnnnnnnnnnnnnnnnnnnnnnnnnnnnnnnnnnnnnnnnnnnnnnnnnnnnnnnnnnnnnnnnnnnnnnnnnnnnnnnnnnnnnnnnnnnnnnnnnnnnnnnnnnnnnnnnnnnnnnnnnnnnnnnnnnnnnnnnnnnnnnnnnnnnnnnnnnnnnnnnnnnnnnnnnnnnnnnnnnnnnnnnnnnnnnnnnnnnnnnnnnnnnnnnnnnnnnnnnnnnnnnnnnnnnnnnnnnnnnnnnnnnnnnnnnnnnnnnnnnnnnnnnnnnnnnnnnnnnnnnnnnnnnnnnnnnnnnnnnnnnnnnnnnnnnnnnnnnnnnnnnnnnnnnnnnnnnnnnnnnnnnnnnnnnnnnnnnnnnnnnnnnnnnnnnnnnnnnnnnnnnnnnnnnnnnnnnnnnnnnnnnnnnnnnnnnnnnnnnnnnnnnnnnnnnnnnnnnnnnnnnnnnnnnnnnnnnnnnnnnnnnnnnnnnnnnnnnnnnnnnnnnnnnnnnnnnnnnnnnnnnnnnnnnnnnnnnnnnnnnnnnnnnnnnnnnnnnnnnnnnnnnnnnnnnnnnnnnnnnnnnnnnnnnnnnnnnnnnnnnnnnnnnnnnnnnnnnnnnnnnnnnnnnnnnnnnnnnnnnnnnnnnnnnnnnnnnnnnnnnnnnnnnnnnnnnnnnnnnnnnnnnnnnnnnnnnnnnnnnnnnnnnnnnnnnnnnnnnnnnnnnnnnnnnnnnnnnnnnnnnnnnnnnnnnnnnnnnnnnnnnnnnnnnnnnnnnnnnnnnnnnnnnnnnnnnnnnnnnnnnnnnnnnnnnnnnnnnnnnnnnnnnnnnnnnnnnnnnnnnnnnnnnnnnnnnnnnnnnnnnnnnnnnnnnnnnnnnnnnnnnnnnnnnnnnnnnnnnnnnnnnnnnnnnnnnnnnnnnnnnnnnnnnnnnnnnnnnnnnnnnnnnnnnnnnnnnnnnnnnnnnnnnnnnnnnnnnnnnnnnnnnnnnnnnnnnnnnnnnnnnnnnnnnnnnnnnnnnnnnnnnnnnnnnnnnnnnnnnnnnnnnnnnnnnnnnnnnnnnnnnnnnnnnnnnnnnnnnnnnnnnnnnnnnnnnnnnnnnnnnnnnnnnnnnnnnnnnnnnnnnnnnnnnnnnnnnnnnnnnnnnnnnnnnnnnnnnnnnnnnnnnnnnnnnnnnnnnnnnnnnnnnnnnnnnnnnnnnnnnnnnnnnnnnnnnnnnnnnnnnnnnnnnnnnnnnnnnnnnnnnnnnnnnnnnnnnnnnnnnnnnnnnnnnnnnnnnnnnnnnnnnnnnnnnnnnnnnnnnnnnnnnnnnnnnnnnnnnnnnnnnnnnnnnnnnnnnnnnnnnnnnnnnnnnnnnnnnnnnnnnnnnnnnnnnnnnnnnnnnnnnnnnnnnnnnnnnnnnnnnnnnnnnnnnnnnnnnnnnnnnnnnnnnnnnnnnnnnnnnnnnnnnnnnnnnnnnnnnnnnnnnnnnnnnnnnnnnnnnnnnnnnnnnnnnnnnnnnnnnnnnnnnnnnnnnnnnnnnnnnnnnnnnnnnnnnnnnnnnnnnnnnnnnnnnnnnnnnnnnnnnnnnnnnnnnnnnnnnnnnnnnnnnnnnnnnnnnnnnnnnnnnnnnnnnnnnnnnnnnnnnnnnnnnnnnnnnnnnnnnnnnnnnnnnnnnnnnnnnnnnnnnnnnnnnnnnnnnnnnnnnnnnnnnnnnnnnnnnnnnnnnnnnnnnnnnnnnnnnnnnnnnnnnnnnnnnnnnnnnnnnnnnnnnnnnnnnnnnnnnnnnnnnnnnnnnnnnnnnnnnnnnnnnnnnnnnnnnnnnnnnnnnnnnnnnnnnnnnnnnnnnnnnnnnnnnnnnnnnnnnnnnnnnnnnnnnnnnnnnnnnnnnnnnnnnnnnnnnnnnnnnnnnnnnnnnnnnnnnnnnnnnnnnnnnnnnnnnnnnnnnnnnnnnnnnnnnnnnnnnnnnnnnnnnnnnnnnnnnnnnnnnnnnnnnnnnnnnnnnnnnnnnnnnnnnnnnnnnnnnnnnnnnnnnnnnnnnnnnnnnnnnnnnnnnnnnnnnnnnnnnnnnnnnnnnnnnnnnnnnnnnnnnnnnnnnnnnnnnnnnnnnnnnnnnnnnnnnnnnnnnnnnnnnnnnnnnnnnnnnnnnnnnnnnnnnnnnnnnnnnnnnnnnnnnnnnnnnnnnnnnnnnnnnnnnnnnnnnnnnnnnnnnnnnnnnnnnnnnnnnnnnnnnnnnnnnnnnnnnnnnnnnnnnnnnnnnnnnnnnnnnnnnnnnnnnnnnnnnnnnnnnnnnnnnnnnnnnnnnnnnnnnnnnnnnnnnnnnnnnnnnnnnnnnnnnnnnnnnnnnnnnnnnnnnnnnnnnnnnnnnnnnnnnnnnnnnnnnnnnnnnnnnnnnnnnnnnnnnnnnnnnnnnnnnnnnnnnnnnnnnnnnnnnnnnnnnnnnnnnnnnnnnnnnnnnnnnnnnnnnnnnnnnnnnnnnnnnnnnnnnnnnnnnnnnnnnnnnnnnnnnnnnnnnnnnnnnnnnnnnnnnnnnnnnnnnnnnnnnnnnnnnnnnnnnnnnnnnnnnnnnnnnnnnnnnnnnnnnnnnnnnnnnnnnnnnnnnnnnnnnnnnnnnnnnnnnnnnnnnnnnnnnnnnnnnnnnnnnnnnnnnnnnnnnnnnnnnnnnnnnnnnnnnnnnnnnnnnnnnnnnnnnnnnnnnnnnnnnnnnnnnnnnnnnnnnnnnnnnnnnnnnnnnnnnnnnnnnnnnnnnnnnnnnnnnnnnnnnnnnnnnnnnnnnnnnnnnnnnnnnnnnnnnnnnnnnnnnnnnnnnnnnnnnnnnnnnnnnnnnnnnnnnnnnnnnnnnnnnnnnnnnnnnnnnnnnnnnnnnnnnnnnnnnnnnnnnnnnnnnnnnnnnnnnnnnnnnnnnnnnnnnnnnnnnnnnnnnnnnnnnnnnnnnnnnnnnnnnnnnnnnnnnnnnnnnnnnnnnnnnnnnnnnnnnnnnnnnnnnnnnnnnnnnnnnnnnnnnnnnnnnnnnnnnnnnnnnnnnnnnnnnnnnnnnnnnnnnnnnnnnnnnnnnnnnnnnnnnnnnnnnnnnnnnnnnnnnnnnnnnnnnnnnnnnnnnnnnnnnnnnnnnnnnnnnnnnnnnnnnnnnnnnnnnnnnnnnnnnnnnnnnnnnnnnnnnnnnnnnnnnnnnnnnnnnnnnnnnnnnnnnnnnnnnnnnnnnnnnnnnnnnnnnnnnnnnnnnnnnnnnnnnnnnnnnnnnnnnnnnnnnnnnnnnnnnnnnnnnnnnnnnnnnnnnnnnnnnnnnnnnnnnnnnnnnnnnnnnnnnnnnnnnnnnnnnnnnnnnnnnnnnnnnnnnnnnnnnnnnnnnnnnnnnnnnnnnnnnnnnnnnnnnnnnnnnnnnnnnnnnnnnnnnnnnnnnnnnnnnnnnnnnnnnnnnnnnnnnnnnnnnnnnnnnnnnnnnnnnnnnnnnnnnnnnnnnnnnnnnnnnnnnnnnnnnnnnnnnnnnnnnnnnnnnnnnnnnnnnnnnnnnnnnnnnnnnnnnnnnnnnnnnnnnnnnnnnnnnnnnnnnnnnnnnnnnnnnnnnnnnnnnnnnnnnnnnnnnnnnnnnnnnnnnnnnnnnnnnnnnnnnnnnnnnnnnnnnnnnnnnnnnnnnnnnnnnnnnnnnnnnnnnnnnnnnnnnnnnnnnnnnnnnnnnnnnnnnnnnnnnnnnnnnnnnnnnnnnnnnnnnnnnnnnnnnnnnnnnnnnnnnnnnnnnnnnnnnnnnnnnnnnnnnnnnnnnnnnnnnnnnnnnnnnnnnnnnnnnnnnnnnnnnnnnnnnnnnnnnnnnnnnnnnnnnnnnnnnnnnnnnnnnnnnnnnnnnnnnnnnnnnnnnnnnnnnnnnnnnnnnnnnnnnnnnnnnnnnnnnnnnnnnnnnnnnnnnnnnnnnnnnnnnnnnnnnnnnnnnnnnnnnnnnnnnnnnnnnnnnnnnnnnnnnnnnnnnnnnnnnnnnnnnnnnnnnnnnnnnnnnnnnnnnnnnnnnnnnnnnnnnnnnnnnnnnnnnnnnnnnnnnnnnnnnnnnnnnnnnnnnnnnnnnnnnnnnnnnnnnnnnnnnnnnnnnnnnnnnnnnnnnnnnnnnnnnnnnnnnnnnnnnnnnnnnnnnnnnnnnnnnnnnnnnnnnnnnnnnnnnnnnnnnnnnnnnnnnnnnnnnnnnnnnnnnnnnnnnnnnnnnnnnnnnnnnnnnnnnnnnnnnnnnnnnnnnnnnnnnnnnnnnnnnnnnnnnnnnnnnnnnnnnnnnnnnnnnnnnnnnnnnnnnnnnnnnnnnnnnnnnnnnnnnnnnnnnnnnnnnnnnnnnnnnnnnnnnnnnnnnnnnnnnnnnnnnnnnnnnnnnnnnnnnnnnnnnnnnnnnnnnnnnnnnnnnnnnnnnnnnnnnnnnnnnnnnnnnnnnnnnnnnnnnnnnnnnnnnnnnnnnnnnnnnnnnnnnnnnnnnnnnnnnnnnnnnnnnnnnnnnnnnnnnnnnnnnnnnnnnnnnnnnnnnnnnnnnnnnnnnnnnnnnnnnnnnnnnnnnnnnnnnnnnnnnnnnnnnnnnnnnnnnnnnnnnnnnnnnnnnnnnnnnnnnnnnnnnnnnnnnnnnnnnnnnnnnnnnnnnnnnnnnnnnnnnnnnnnnnnnnnnnnnnnnnnnnnnnnnnnnnnnnnnnnnnnnnnnnnnnnnnnnnnnnnnnnnnnnnnnnnnnnnnnnnnnnnnnnnnnnnnnnnnnnnnnnnnnnnnnnnnnnnnnnnnnnnnnnnnnnnnnnnnnnnnnnnnnnnnnnnnnnnnnnnnnnnnnnnnnnnnnnnnnnnnnnnnnnnnnnnnnnnnnnnnnnnnnnnnnnnnnnnnnnnnnnnnnnnnnnnnnnnnnnnnnnnnnnnnnnnnnnnnnnnnnnnnnnnnnnnnnnnnnnnnnnnnnnnnnnnnnnnnnnnnnnnnnnnnnnnnnnnnnnnnnnnnnnnnnnnnnnnnnnnnnnnnnnnnnnnnnnnnnnnnnnnnnnnnnnnnnnnnnnnnnnnnnnnnnnnnnnnnnnnnnnnnnnnnnnnnnnnnnnnnnnnnnnnnnnnnnnnnnnnnnnnnnnnnnnnnnnnnnnnnnnnnnnnnnnnnnnnnnnnnnnnnnnnnnnnnnnnnnnnnnnnnnnnnnnnnnnnnnnnnnnnnnnnnnnnnnnnnnnnnnnnnnnnnnnnnnnnnnnnnnnnnnnnnnnnnnnnnnnnnnnnnnnnnnnnnnnnnnnnnnnnnnnnnnnnnnnnnnnnnnnnnnnnnnnnnnnnnnnnnnnnnnnnnnnnnnnnnnnnnnnnnnnnnnnnnnnnnnnnnnnnnnnnnnnnnnnnnnnnnnnnnnnnnnnnnnnnnnnnnnnnnnnnnnnnnnnnnnnnnnnnnnnnnnnnnnnnnnnnnnnnnnnnnnnnnnnnnnnnnnnnnnnnnnnnnnnnnnnnnnnnnnnnnnnnnnnnnnnnnnnnnnnnnnnnnnnnnnnnnnnnnnnnnnnnnnnnnnnnnnnnnnnnnnnnnnnnnnnnnnnnnnnnnnnnnnnnnnnnnnnnnnnnnnnnnnnnnnnnnnnnnnnnnnnnnnnnnnnnnnnnnnnnnnnnnnnnnnnnnnnnnnnnnnnnnnnnnnnnnnnnnnnnnnnnnnnnnnnnnnnnnnnnnnnnnnnnnnnnnnnnnnnnnnnnnnnnnnnnnnnnnnnnnnnnnnnnnnnnnnnnnnnnnnnnnnnnnnnnnnnnnnnnnnnnnnnnnnnnnnnnnnnnnnnnnnnnnnnnnnnnnnnnnnnnnnnnnnnnnnnnnnnnnnnnnnnnnnnnnnnnnnnnnnnnnnnnnnnnnnnnnnnnnnnnnnnnnnnnnnnnnnnnnnnnnnnnnnnnnnnnnnnnnnnnnnnnnnnnnnnnnnnnnnnnnnnnnnnnnnnnnnnnnnnnnnnnnnnnnnnnnnnnnnnnnnnnnnnnnnnnnnnnnnnnnnnnnnnnnnnnnnnnnnnnnnnnnnnnnnnnnnnnnnnnnnnnnnnnnnnnnnnnnnnnnnnnnnnnnnnnnnnnnnnnnnnnnnnnnnnnnnnnnnnnnnnnnnnnnnnnnnnnnnnnnnnnnnnnnnnnnnnnnnnnnnnnnnnnnnnnnnnnnnnnnnnnnnnnnnnnnnnnnnnnnnnnnnnnnnnnnnnnnnnnnnnnnnnnnnnnnnnnnnnnnnnnnnnnnnnnnnnnnnnnnnnnnnnnnnnnnnnnnnnnnnnnnnnnnnnnnnnnnnnnnnnnnnnnnnnnnnnnnnnnnnnnnnnnnnnnnnnnnnnnnnnnnnnnnnnnnnnnnnnnnnnnnnnnnnnnnnnnnnnnnnnnnnnnnnnnnnnnnnnnnnnnnnnnnnnnnnnnnnnnnnnnnnnnnnnnnnnnnnnnnnnnnnnnnnnnnnnnnnnnnnnnnnnnnnnnnnnnnnnnnnnnnnnnnnnnnnnnnnnnnnnnnnnnnnnnnnnnnnnnnnnnnnnnnnnnnnnnnnnnnnnnnnnnnnnnnnnnnnnnnnnnnnnnnnnnnnnnnnnnnnnnnnnnnnnnnnnnnnnnnnnnnnnnnnnnnnnnnnnnnnnnnnnnnnnnnnnnnnnnnnnnnnnnnnnnnnnnnnnnnnnnnnnnnnnnnnnnnnnnnnnnnnnnnnnnnnnnnnnnnnnnnnnnnnnnnnnnnnnnnnnnnnnnnnnnnnnnnnnnnnnnnnnnnnnnnnnnnnnnnnnnnnnnnnnnnnnnnnnnnnnnnnnnnnnnnnnnnnnnnnnnnnnnnnnnnnnnnnnnnnnnnnnnnnnnnnnnnnnnnnnnnnnnnnnnnnnnnnnnnnnnnnnnnnnnnnnnnnnnnnnnnnnnnnnnnnnnnnnnnnnnnnnnnnnnnnnnnnnnnnnnnnnnnnnnnnnnnnnnnnnnnnnnnnnnnnnnnnnnnnnnnnnnnnnnnnnnnnnnnnnnnnnnnnnnnnnnnnnnnnnnnnnnnnnnnnnnnnnnnnnnnnnnnnnnnnnnnnnnnnnnnnnnnnnnnnnnnnnnnnnnnnnnnnnnnnnnnnnnnnnnnnnnnnnnnnnnnnnnnnnnnnnnnnnnnnnnnnnnnnnnnnnnnnnnnnnnnnnnnnnnnnnnnnnnnnnnnnnnnnnnnnnnnnnnnnnnnnnnnnnnnnnnnnnnnnnnnnnnnnnnnnnnnnnnnnnnnnnnnnnnnnnnnnnnnnnnnnnnnnnnnnnnnnnnnnnnnnnnnnnnnnnnnnnnnnnnnnnnnnnnnnnnnnnnnnnnnnnnnnnnnnnnnnnnnnnnnnnnnnnnnnnnnnnnnnnnnnnnnnnnnnnnnnnnnnnnnnnnnnnnnnnnnnnnnnnnnnnnnnnnnnnnnnnnnnnnnnnnnnnnnnnnnnnnnnnnnnnnnnnnnnnnnnnnnnnnnnnnnnnnnnnnnnnnnnnnnnnnnnnnnnnnnnnnnnnnnnnnnnnnnnnnnnnnnnnnnnnnnnnnnnnnnnnnnnnnnnnnnnnnnnnnnnnnnnnnnnnnnnnnnnnnnnnnnnnnnnnnnnnnnnnnnnnnnnnnnnnnnnnnnnnnnnnnnnnnnnnnnnnnnnnnnnnnnnnnnnnnnnnnnnnnnnnnnnnnnnnnnnnnnnnnnnnnnnnnnnnnnnnnnnnnnnnnnnnnnnnnnnnnnnnnnnnnnnnnnnnnnnnnnnnnnnnnnnnnnnnnnnnnnnnnnnnnnnnnnnnnnnnnnnnnnnnnnnnnnnnnnnnnnnnnnnnnnnnnnnnnnnnnnnnnnnnnnnnnnnnnnnnnnnnnnnnnnnnnnnnnnnnnnnnnnnnnnnnnnnnnnnnnnnnnnnnnnnnnnnnnnnnnnnnnnnnnnnnnnnnnnnnnnnnnnnnnnnnnnnnnnnnnnnnnnnnnnnnnnnnnnnnnnnnnnnnnnnnnnnnnnnnnnnnnnnnnnnnnnnnnnnnnnnnnnnnnnnnnnnnnnnnnnnnnnnnnnnnnnnnnnnnnnnnnnnnnnnnnnnnnnnnnnnnnnnnnnnnnnnnnnnnnnnnnnnnnnnnnnnnnnnnnnnnnnnnnnnnnnnnnnnnnnnnnnnnnnnnnnnnnnnnnnnnnnnnnnnnnnnnnnnnnnnnnnnnnnnnnnnnnnnnnnnnnnnnnnnnnnnnnnnnnnnnnnnnnnnnnnnnnnnnnnnnnnnnnnnnnnnnnnnnnnnnnnnnnnnnnnnnnnnnnnnnnnnnnnnnnnnnnnnnnnnnnnnnnnnnnnnnnnnnnnnnnnnnnnnnnnnnnnnnnnnnnnnnnnnnnnnnnnnnnnnnnnnnnnnnnnnnnnnnnnnnnnnnnnnnnnnnnnnnnnnnnnnnnnnnnnnnnnnnnnnnnnnnnnnnnnnnnnnnnnnnnnnnnnnnnnnnnnnnnnnnnnnnnnnnnnnnnnnnnnnnnnnnnnnnnnnnnnnnnnnnnnnnnnnnnnnnnnnnnnnnnnnnnnnnnnnnnnnnnnnnnnnnnnnnnnnnnnnnnnnnnnnnnnnnnnnnnnnnnnnnnnnnnnnnnnnnnnnnnnnnnnnnnnnnnnnnnnnnnnnnnnnnnnnnnnnnnnnnnnnnnnnnnnnnnnnnnnnnnnnnnnnnnnnnnnnnnnnnnnnnnnnnnnnnnnnnnnnnnnnnnnnnnnnnnnnnnnnnnnnnnnnnnnnnnnnnnnnnnnnnnnnnnnnnnnnnnnnnnnnnnnnnnnnnnnnnnnnnnnnnnnnnnnnnnnnnnnnnnnnnnnnnnnnnnnnnnnnnnnnnnnnnnnnnnnnnnnnnnnnnnnnnnnnnnnnnnnnnnnnnnnnnnnnnnnnnnnnnnnnnnnnnnnnnnnnnnnnnnnnnnnnnnnnnnnnnnnnnnnnnnnnnnnnnnnnnnnnnnnnnnnnnnnnnnnnnnnnnnnnnnnnnnnnnnnnnnnnnnnnnnnnnnnnnnnnnnnnnnnnnnnnnnnnnnnnnnnnnnnnnnnnnnnnnnnnnnnnnnnnnnnnnnnnnnnnnnnnnnnnnnnnnnnnnnnnnnnnnnnnnnnnnnnnnnnnnnnnnnnnnnnnnnnnnnnnnnnnnnnnnnnnnnnnnnnnnnnnnnnnnnnnnnnnnnnnnnnnnnnnnnnnnnnnnnnnnnnnnnnnnnnnnnnnnnnnnnnnnnnnnnnnnnnnnnnnnnnnnnnnnnnnnnnnnnnnnnnnnnnnnnnnnnnnnnnnnnnnnnnnnnnnnnnnnnnnnnnnnnnnnnnnnnnnnnnnnnnnnnnnnnnnnnnnnnnnnnnnnnnnnnnnnnnnnnnnnnnnnnnnnnnnnnnnnnnnnnnnnnnnnnnnnnnnnnnnnnnnnnnnnnnnnnnnnnnnnnnnnnnnnnnnnnnnnnnnnnnnnnnnnnnnnnnnnnnnnnnnnnnnnnnnnnnnnnnnnnnnnnnnnnnnnnnnnnnnnnnnnnnnnnnnnnnnnnnnnnnnnnnnnnnnnnnnnnnnnnnnnnnnnnnnnnnnnnnnnnnnnnnnnnnnnnnnnnnnnnnnnnnnnnnnnnnnnnnnnnnnnnnnnnnnnnnnnnnnnnnnnnnnnnnnnnnnnnnnnnnnnnnnnnnnnnnnnnnnnnnnnnnnnnnnnnnnnnnnnnnnnnnnnnnnnnnnnnnnnnnnnnnnnnnnnnnnnnnnnnnnnnnnnnnnnnnnnnnnnnnnnnnnnnnnnnnnnnnnnnnnnnnnnnnnnnnnnnnnnnnnnnnnnnnnnnnnnnnnnnnnnnnnnnnnnnnnnnnnnnnnnnnnnnnnnnnnnnnnnnnnnnnnnnnnnnnnnnnnnnnnnnnnnnnnnnnnnnnnnnnnnnnnnnnnnnnnnnnnnnnnnnnnnnnnnnnnnnnnnnnnnnnnnnnnnnnnnnnnnnnnnnnnnnnnnnnnnnnnnnnnnnnnnnnnnnnnnnnnnnnnnnnnnnnnnnnnnnnnnnnnnnnnnnnnnnnnnnnnnnnnnnnnnnnnnnnnnnnnnnnnnnnnnnnnnnnnnnnnnnnnnnnnnnnnnnnnnnnnnnnnnnnnnnnnnnnnnnnnnnnnnnnnnnnnnnnnnnnnnnnnnnnnnnnnnnnnnnnnnnnnnnnnnnnnnnnnnnnnnnnnnnnnnnnnnnnnnnnnnnnnnnnnnnnnnnnnnnnnnnnnnnnnnnnnnnnnnnnnnnnnnnnnnnnnnnnnnnnnnnnnnnnnnnnnnnnnnnnnnnnnnnnnnnnnnnnnnnnnnnnnnnnnnnnnnnnnnnnnnnnnnnnnnnnnnnnnnnnnnnnnnnnnnnnnnnnnnnnnnnnnnnnnnnnnnnnnnnnnnnnnnnnnnnnnnnnnnnnnnnnnnnnnnnnnnnnnnnnnnnnnnnnnnnnnnnnnnnnnnnnnnnnnnnnnnnnnnnnnnnnnnnnnnnnnnnnnnnnnnnnnnnnnnnnnnnnnnnnnnnnnnnnnnnnnnnnnnnnnnnnnnnnnnnnnnnnnnnnnnnnnnnnnnnnnnnnnnnnnnnnnnnnnnnnnnnnnnnnnnnnnnnnnnnnnnnnnnnnnnnnnnnnnnnnnnnnnnnnnnnnnnnnnnnnnnnnnnnnnnnnnnnnnnnnnnnnnnnnnnnnnnnnnnnnnnnnnnnnnnnnnnnnnnnnnnnnnnnnnnnnnnnnnnnnnnnnnnnnnnnnnnnnnnnnnnnnnnnnnnnnnnnnnnnnnnnnnnnnnnnnnnnnnnnnnnnnnnnnnnnnnnnnnnnnnnnnnnnnnnnnnnnnnnnnnnnnnnnnnnnnnnnnnnnnnnnnnnnnnnnnnnnnnnnnnnnnnnnnnnnnnnnnnnnnnnnnnnnnnnnnnnnnnnnnnnnnnnnnnnnnnnnnnnnnnnnnnnnnnnnnnnnnnnnnnnnnnnnnnnnnnnnnnnnnnnnnnnnnnnnnnnnnnnnnnnnnnnnnnnnnnnnnnnnnnnnnnnnnnnnnnnnnnnnnnnnnnnnnnnnnnnnnnnnnnnnnnnnnnnnnnnnnnnnnnnnnnnnnnnnnnnnnnnnnnnnnnnnnnnnnnnnnnnnnnnnnnnnnnnnnnnnnnnnnnnnnnnnnnnnnnnnnnnnnnnnnnnnnnnnnnnnnnnnnnnnnnnnnnnnnnnnnnnnnnnnnnnnnnnnnnnnnnnnnnnnnnnnnnnnnnnnnnnnnnnnnnnnnnnnnnnnnnnnnnnnnnnnnnnnnnnnnnnnnnnnnnnnnnnnnnnnnnnnnnnnnnnnnnnnnnnnnnnnnnnnnnnnnnnnnnnnnnnnnnnnnnnnnnnnnnnnnnnnnnnnnnnnnnnnnnnnnnnnnnnnnnnnnnnnnnnnnnnnnnnnnnnnnnnnnnnnnnnnnnnnnnnnnnnnnnnnnnnnnnnnnnnnnnnnnnnnnnnnnnnnnnnnnnnnnnnnnnnnnnnnnnnnnnnnnnnnnnnnnnnnnnnnnnnnnnnnnnnnnnnnnnnnnnnnnnnnnnnnnnnnnnnnnnnnnnnnnnnnnnnnnnnnnnnnnnnnnnnnnnnnnnnnnnnnnnnnnnnnnnnnnnnnnnnnnnnnnnnnnnnnnnnnnnnnnnnnnnnnnnnnnnnnnnnnnnnnnnnnnnnnnnnnnnnnnnnnnnnnnnnnnnnnnnnnnnnnnnnnnnnnnnnnnnnnnnnnnnnnnnnnnnnnnnnnnnnnnnnnnnnnnnnnnnnnnnnnnnnnnnnnnnnnnnnnnnnnnnnnnnnnnnnnnnnnnnnnnnnnnnnnnnnnnnnnnnnnnnnnnnnnnnnnnnnnnnnnnnnnnnnnnnnnnnnnnnnnnnnnnnnnnnnnnnnnnnnnnnnnnnnnnnnnnnnnnnnnnnnnnnnnnnnnnnnnnnnnnnnnnnnnnnnnnnnnnnnnnnnnnnnnnnnnnnnnnnnnnnnnnnnnnnnnnnnnnnnnnnnnnnnnnnnnnnnnnnnnnnnnnnnnnnnnnnnnnnnnnnnnnnnnnnnnnnnnnnnnnnnnnnnnnnnnnnnnnnnnnnnnnnnnnnnnnnnnnnnnnnnnnnnnnnnnnnnnnnnnnnnnnnnnnnnnnnnnnnnnnnnnnnnnnnnnnnnnnnnnnnnnnnnnnnnnnnnnnnnnnnnnnnnnnnnnnnnnnnnnnnnnnnnnnnnnnnnnnnnnnnnnnnnnnnnnnnnnnnnnnnnnnnnnnnnnnnnnnnnnnnnnnnnnnnnnnnnnnnnnnnnnnnnnnnnnnnnnnnnnnnnnnnnnnnnnnnnnnnnnnnnnnnnnnnnnnnnnnnnnnnnnnnnnnnnnnnnnnnnnnnnnnnnnnnnnnnnnnnnnnnnnnnnnnnnnnnnnnnnnnnnnnnnnnnnnnnnnnnnnnnnnnnnnnnnnnnnnnnnnnnnnnnnnnnnnnnnnnnnnnnnnnnnnnnnnnnnnnnnnnnnnnnnnnnnnnnnnnnnnnnnnnnnnnnnnnnnnnnnnnnnnnnnnnnnnnnnnnnnnnnnnnnnnnnnnnnnnnnnnnnnnnnnnnnnnnnnnnnnnnnnnnnnnnnnnnnnnnnnnnnnnnnnnnnnnnnnnnnnnnnnnnnnnnnnnnnnnnnnnnnnnnnnnnnnnnnnnnnnnnnnnnnnnnnnnnnnnnnnnnnnnnnnnnnnnnnnnnnnnnnnnnnnnnnnnnnnnnnnnnnnnnnnnnnnnnnnnnnnnnnnnnnnnnnnnnnnnnnnnnnnnnnnnnnnnnnnnnnnnnnnnnnnnnnnnnnnnnnnnnnnnnnnnnnnnnnnnnnnnnnnnnnnnnnnnnnnnnnnnnnnnnnnnnnnnnnnnnnnnnnnnnnnnnnnnnnnnnnnnnnnnnnnnnnnnnnnnnnnnnnnnnnnnnnnnnnnnnnnnnnnnnnnnnnnnnnnnnnnnnnnnnnnnnnnnnnnnnnnnnnnnnnnnnnnnnnnnnnnnnnnnnnnnnnnnnnnnnnnnnnnnnnnnnnnnnnnnnnnnnnnnnnnnnnnnnnnnnnnnnnnnnnnnnnnnnnnnnnnnnnnnnnnnnnnnnnnnnnnnnnnnnnnnnnnnnnnnnnnnnnnnnnnnnnnnnnnnnnnnnnnnnnnnnnnnnnnnnnnnnnnnnnnnnnnnnnnnnnnnnnnnnnnnnnnnnnnnnnnnnnnnnnnnnnnnnnnnnnnnnnnnnnnnnnnnnnnnnnnnnnnnnnnnnnnnnnnnnnnnnnnnnnnnnnnnnnnnnnnnnnnnnnnnnnnnnnnnnnnnnnnnnnnnnnnnnnnnnnnnnnnnnnnnnnnnnnnnnnnnnnnnnnnnnnnnnnnnnnnnnnnnnnnnnnnnnnnnnnnnnnnnnnnnnnnnnnnnnnnnnnnnnnnnnnnnnnnnnnnnnnnnnnnnnnnnnnnnnnnnnnnnnnnnnnnnnnnnnnnnnnnnnnnnnnnnnnnnnnnnnnnnnnnnnnnnnnnnnnnnnnnnnnnnnnnnnnnnnnnnnnnnnnnnnnnnnnnnnnnnnnnnnnnnnnnnnnnnnnnnnnnnnnnnnnnnnnnnnnnnnnnnnnnnnnnnnnnnnnnnnnnnnnnnnnnnnnnnnnnnnnnnnnnnnnnnnnnnnnnnnnnnnnnnnnnnnnnnnnnnnnnnnnnnnnnnnnnnnnnnnnnnnnnnnnnnnnnnnnnnnnnnnnnnnnnnnnnnnnnnnnnnnnnnnnnnnnnnnnnnnnnnnnnnnnnnnnnnnnnnnnnnnnnnnnnnnnnnnnnnnnnnnnnnnnnnnnnnnnnnnnnnnnnnnnnnnnnnnnnnnnnnnnnnnnnnnnnnnnnnnnnnnnnnnnnnnnnnnnnnnnnnnnnnnnnnnnnnnnnnnnnnnnnnnnnnnnnnnnnnnnnnnnnnnnnnnnnnnnnnnnnnnnnnnnnnnnnnnnnnnnnnnnnnnnnnnnnnnnnnnnnnnnnnnnnnnnnnnnnnnnnnnnnnnnnnnnnnnnnnnnnnnnnnnnnnnnnnnnnnnnnnnnnnnnnnnnnnnnnnnnnnnnnnnnnnnnnnnnnnnnnnnnnnnnnnnnnnnnnnnnnnnnnnnnnnnnnnnnnnnnnnnnnnnnnnnnnnnnnnnnnnnnnnnnnnnnnnnnnnnnnnnnnnnnnnnnnnnnnnnnnnnnnnnnnnnnnnnnnnnnnnnnnnnnnnnnnnnnnnnnnnnnnnnnnnnnnnnnnnnnnnnnnnnnnnnnnnnnnnnnnnnnnnnnnnnnnnnnnnnnnnnnnnnnnnnnnnnnnnnnnnnnnnnnnnnnnnnnnnnnnnnnnnnnnnnnnnnnnnnnnnnnnnnnnnnnnnnnnnnnnnnnnnnnnnnnnnnnnnnnnnnnnnnnnnnnnnnnnnnnnnnnnnnnnnnnnnnnnnnnnnnnnnnnnnnnnnnnnnnnnnnnnnnnnnnnnnnnnnnnnnnnnnnnnnnnnnnnnnnnnnnnnnnnnnnnnnnnnnnnnnnnnnnnnnnnnnnnnnnnnnnnnnnnnnnnnnnnnnnnnnnnnnnnnnnnnnnnnnnnnnnnnnnnnnnnnnnnnnnnnnnnnnnnnnnnnnnnnnnnnnnnnnnnnnnnnnnnnnnnnnnnnnnnnnnnnnnnnnnnnnnnnnnnnnnnnnnnnnnnnnnnnnnnnnnnnnnnnnnnnnnnnnnnnnnnnnnnnnnnnnnnnnnnnnnnnnnnnnnnnnnnnnnnnnnnnnnnnnnnnnnnnnnnnnnnnnnnnnnnnnnnnnnnnnnnnnnnnnnnnnnnnnnnnnnnnnnnnnnnnnnnnnnnnnnnnnnnnnnnnnnnnnnnnnnnnnnnnnnnnnnnnnnnnnnnnnnnnnnnnnnnnnnnnnnnnnnnnnnnnnnnnnnnnnnnnnnnnnnnnnnnnnnnnnnnnnnnnnnnnnnnnnnnnnnnnnnnnnnnnnnnnnnnnnnnnnnnnnnnnnnnnnnnnnnnnnnnnnnnnnnnnnnnnnnnnnnnnnnnnnnnnnnnnnnnnnnnnnnnnnnnnnnnnnnnnnnnnnnnnnnnnnnnnnnnnnnnnnnnnnnnnnnnnnnnnnnnnnnnnnnnnnnnnnnnnnnnnnnnnnnnnnnnnnnnnnnnnnnnnnnnnnnnnnnnnnnnnnnnnnnnnnnnnnnnnnnnnnnnnnnnnnnnnnnnnnnnnnnnnnnnnnnnnnnnnnnnnnnnnnnnnnnnnnnnnnnnnnnnnnnnnnnnnnnnnnnnnnnnnnnnnnnnnnnnnnnnnnnnnnnnnnnnnnnnnnnnnnnnnnnnnnnnnnnnnnnnnnnnnnnnnnnnnnnnnnnnnnnnnnnnnnnnnnnnnnnnnnnnnnnnnnnnnnnnnnnnnnnnnnnnnnnnnnnnnnnnnnnnnnnnnnnnnnnnnnnnnnnnnnnnnnnnnnnnnnnnnnnnnnnnnnnnnnnnnnnnnnnnnnnnnnnnnnnnnnnnnnnnnnnnnnnnnnnnnnnnnnnnnnnnnnnnnnnnnnnnnnnnnnnnnnnnnnnnnnnnnnnnnnnnnnnnnnnnnnnnnnnnnnnnnnnnnnnnnnnnnnnnnnnnnnnnnnnnnnnnnnnnnnnnnnnnnnnnnnnnnnnnnnnnnnnnnnnnnnnnnnnnnnnnnnnnnnnnnnnnnnnnnnnnnnnnnnnnnnnnnnnnnnnnnnnnnnnnnnnnnnnnnnnnnnnnnnnnnnnnnnnnnnnnnnnnnnnnnnnnnnnnnnnnnnnnnnnnnnnnnnnnnnnnnnnnnnnnnnnnnnnnnnnnnnnnnnnnnnnnnnnnnnnnnnnnnnnnnnnnnnnnnnnnnnnnnnnnnnnnnnnnnnnnnnnnnnnnnnnnnnnnnnnnnnnnnnnnnnnnnnnnnnnnnnnnnnnnnnnnnnnnnnnnnnnnnnnnnnnnnnnnnnnnnnnnnnnnnnnnnnnnnnnnnnnnnnnnnnnnnnnnnnnnnnnnnnnnnnnnnnnnnnnnnnnnnnnnnnnnnnnnnnnnnnnnnnnnnnnnnnnnnnnnnnnnnnnnnnnnnnnnnnnnnnnnnnnnnnnnnnnnnnnnnnnnnnnnnnnnnnnnnnnnnnnnnnnnnnnnnnnnnnnnnnnnnnnnnnnnnnnnnnnnnnnnnnnnnnnnnnnnnnnnnnnnnnnnnnnnnnnnnnnnnnnnnnnnnnnnnnnnnnnnnnnnnnnnnnnnnnnnnnnnnnnnnnnnnnnnnnnnnnnnnnnnnnnnnnnnnnnnnnnnnnnnnnnnnnnnnnnnnnnnnnnnnnnnnnnnnnnnnnnnnnnnnnnnnnnnnnnnnnnnnnnnnnnnnnnnnnnnnnnnnnnnnnnnnnnnnnnnnnnnnnnnnnnnnnnnnnnnnnnnnnnnnnnnnnnnnnnnnnnnnnnnnnnnnnnnnnnnnnnnnnnnnnnnnnnnnnnnnnnnnnnnnnnnnnnnnnnnnnnnnnnnnnnnnnnnnnnnnnnnnnnnnnnnnnnnnnnnnnnnnnnnnnnnnnnnnnnnnnnnnnnnnnnnnnnnnnnnnnnnnnnnnnnnnnnnnnnnnnnnnnnnnnnnnnnnnnnnnnnnnnnnnnnnnnnnnnnnnnnnnnnnnnnnnnnnnnnnnnnnnnnnnnnnnnnnnnnnnnnnnnnnnnnnnnnnnnnnnnnnnnnnnnnnnnnnnnnnnnnnnnnnnnnnnnnnnnnnnnnnnnnnnnnnnnnnnnnnnnnnnnnnnnnnnnnnnnnnnnnnnnnnnnnnnnnnnnnnnnnnnnnnnnnnnnnnnnnnnnnnnnnnnnnnnnnnnnnnnnnnnnnnnnnnnnnnnnnnnnnnnnnnnnnnnnnnnnnnnnnnnnnnnnnnnnnnnnnnnnnnnnnnnnnnnnnnnnnnnnnnnnnnnnnnnnnnnnnnnnnnnnnnnnnnnnnnnnnnnnnnnnnnnnnnnnnnnnnnnnnnnnnnnnnnnnnnnnnnnnnnnnnnnnnnnnnnnnnnnnnnnnnnnnnnnnnnnnnnnnnnnnnnnnnnnnnnnnnnnnnnnnnnnnnnnnnnnnnnnnnnnnnnnnnnnnnnnnnnnnnnnnnnnnnnnnnnnnnnnnnnnnnnnnnnnnnnnnnnnnnnnnnnnnnnnnnnnnnnnnnnnnnnnnnnnnnnnnnnnnnnnnnnnnnnnnnnnnnnnnnnnnnnnnnnnnnnnnnnnnnnnnnnnnnnnnnnnnnnnnnnnnnnnnnnnnnnnnnnnnnnnnnnnnnnnnnnnnnnnnnnnnnnnnnnnnnnnnnnnnnnnnnnnnnnnnnnnnnnnnnnnnnnnnnnnnnnnnnnnnnnnnnnnnnnnnnnnnnnnnnnnnnnnnnnnnnnnnnnnnnnnnnnnnnnnnnnnnnnnnnnnnnnnnnnnnnnnnnnnnnnnnnnnnnnnnnnnnnnnnnnnnnnnnnnnnnnnnnnnnnnnnnnnnnnnnnnnnnnnnnnnnnnnnnnnnnnnnnnnnnnnnnnnnnnnnnnnnnnnnnnnnnnnnnnnnnnnnnnnnnnnnnnnnnnnnnnnnnnnnnnnnnnnnnnnnnnnnnnnnnnnnnnnnnnnnnnnnnnnnnnnnnnnnnnnnnnnnnnnnnnnnnnnnnnnnnnnnnnnnnnnnnnnnnnnnnnnnnnnnnnnnnnnnnnnnnnnnnnnnnnnnnnnnnnnnnnnnnnnnnnnnnnnnnnnnnnnnnnnnnnnnnnnnnnnnnnnnnnnnnnnnnnnnnnnnnnnnnnnnnnnnnnnnnnnnnnnnnnnnnnnnnnnnnnnnnnnnnnnnnnnnnnnnnnnnnnnnnnnnnnnnnnnnnnnnnnnnnnnnnnnnnnnnnnnnnnnnnnnnnnnnnnnnnnnnnnnnnnnnnnnnnnnnnnnnnnnnnnnnnnnnnnnnnnnnnnnnnnnnnnnnnnnnnnnnnnnnnnnnnnnnnnnnnnnnnnnnnnnnnnnnnnnnnnnnnnnnnnnnnnnnnnnnnnnnnnnnnnnnnnnnnnnnnnnnnnnnnnnnnnnnnnnnnnnnnnnnnnnnnnnnnnnnnnnnnnnnnnnnnnnnnnnnnnnnnnnnnnnnnnnnnnnnnnnnnnnnnnnnnnnnnnnnnnnnnnnnnnnnnnnnnnnnnnnnnnnnnnnnnnnnnnnnnnnnnnnnnnnnnnnnnnnnnnnnnnnnnnnnnnnnnnnnnnnnnnnnnnnnnnnnnnnnnnnnnnnnnnnnnnnnnnnnnnnnnnnnnnnnnnnnnnnnnnnnnnnnnnnnnnnnnnnnnnnnnnnnnnnnnnnnnnnnnnnnnnnnnnnnnnnnnnnnnnnnnnnnnnnnnnnnnnnnnnnnnnnnnnnnnnnnnnnnnnnnnnnnnnnnnnnnnnnnnnnnnnnnnnnnnnnnnnnnnnnnnnnnnnnnnnnnnnnnnnnnnnnnnnnnnnnnnnnnnnnnnnnnnnnnnnnnnnnnnnnnnnnnnnnnnnnnnnnnnnnnnnnnnnnnnnnnnnnnnnnnnnnnnnnnnnnnnnnnnnnnnnnnnnnnnnnnnnnnnnnnnnnnnnnnnnnnnnnnnnnnnnnnnnnnnnnnnnnnnnnnnnnnnnnnnnnnnnnnnnnnnnnnnnnnnnnnnnnnnnnnnnnnnnnnnnnnnnnnnnnnnnnnnnnnnnnnnnnnnnnnnnnnnnnnnnnnnnnnnnnnnnnnnnnnnnnnnnnnnnnnnnnnnnnnnnnnnnnnnnnnnnnnnnnnnnnnnnnnnnnnnnnnnnnnnnnnnnnnnnnnnnnnnnnnnnnnnnnnnnnnnnnnnnnnnnnnnnnnnnnnnnnnnnnnnnnnnnnnnnnnnnnnnnnnnnnnnnnnnnnnnnnnnnnnnnnnnnnnnnnnnnnnnnnnnnnnnnnnnnnnnnnnnnnnnnnnnnnnnnnnnnnnnnnnnnnnnnnnnnnnnnnnnnnnnnnnnnnnnnnnnnnnnnnnnnnnnnnnnnnnnnnnnnnnnnnnnnnnnnnnnnnnnnnnnnnnnnnnnnnnnnnnnnnnnnnnnnnnnnnnnnnnnnnnnnnnnnnnnnnnnnnnnnnnnnnnnnnnnnnnnnnnnnnnnnnnnnnnnnnnnnnnnnnnnnnnnnnnnnnnnnnnnnnnnnnnnnnnnnnnnnnnnnnnnnnnnnnnnnnnnnnnnnnnnnnnnnnnnnnnnnnnnnnnnnnnnnnnnnnnnnnnnnnnnnnnnnnnnnnnnnnnnnnnnnnnnnnnnnnnnnnnnnnnnnnnnnnnnnnnnnnnnnnnnnnnnnnnnnnnnnnnnnnnnnnnnnnnnnnnnnnnnnnnnnnnnnnnnnnnnnnnnnnnnnnnnnnnnnnnnnnnnnnnnnnnnnnnnnnnnnnnnnnnnnnnnnnnnnnnnnnnnnnnnnnnnnnnnnnnnnnnnnnnnnnnnnnnnnnnnnnnnnnnnnnnnnnnnnnnnnnnnnnnnnnnnnnnnnnnnnnnnnnnnnnnnnnnnnnnnnnnnnnnnnnnnnnnnnnnnnnnnnnnnnnnnnnnnnnnnnnnnnnnnnnnnnnnnnnnnnnnnnnnnnnnnnnnnnnnnnnnnnnnnnnnnnnnnnnnnnnnnnnnnnnnnnnnnnnnnnnnnnnnnnnnnnnnnnnnnnnnnnnnnnnnnnnnnnnnnnnnnnnnnnnnnnnnnnnnnnnnnnnnnnnnnnnnnnnnnnnnnnnnnnnnnnnnnnnnnnnnnnnnnnnnnnnnnnnnnnnnnnnnnnnnnnnnnnnnnnnnnnnnnnnnnnnnnnnnnnnnnnnnnnnnnnnnnnnnnnnnnnnnnnnnnnnnnnnnnnnnnnnnnnnnnnnnnnnnnnnnnnnnnnnnnnnnnnnnnnnnnnnnnnnnnnnnnnnnnnnnnnnnnnnnnnnnnnnnnnnnnnnnnnnnnnnnnnnnnnnnnnnnnnnnnnnnnnnnnnnnnnnnnnnnnnnnnnnnnnnnnnnnnnnnnnnnnnnnnnnnnnnnnnnnnnnnnnnnnnnnnnnnnnnnnnnnnnnnnnnnnnnnnnnnnnnnnnnnnnnnnnnnnnnnnnnnnnnnnnnnnnnnnnnnnnnnnnnnnnnnnnnnnnnnnnnnnnnnnnnnnnnnnnnnnnnnnnnnnnnnnnnnnnnnnnnnnnnnnnnnnnnnnnnnnnnnnnnnnnnnnnnnnnnnnnnnnnnnnnnnnnnnnnnnnnnnnnnnnnnnnnnnnnnnnnnnnnnnnnnnnnnnnnnnnnnnnnnnnnnnnnnnnnnnnnnnnnnnnnnnnnnnnnnnnnnnnnnnnnnnnnnnnnnnnnnnnnnnnnnnnnnnnnnnnnnnnnnnnnnnnnnnnnnnnnnnnnnnnnnnnnnnnnnnnnnnnnnnnnnnnnnnnnnnnnnnnnnnnnnnnnnnnnnnnnnnnnnnnnnnnnnnnnnnnnnnnnnnnnnnnnnnnnnnnnnnnnnnnnnnnnnnnnnnnnnnnnnnnnnnnnnnnnnnnnnnnnnnnnnnnnnnnnnnnnnnnnnnnnnnnnnnnnnnnnnnnnnnnnnnnnnnnnnnnnnnnnnnnnnnnnnnnnnnnnnnnnnnnnnnnnnnnnnnnnnnnnnnnnnnnnnnnnnnnnnnnnnnnnnnnnnnnnnnnnnnnnnnnnnnnnnnnnnnnnnnnnnnnnnnnnnnnnnnnnnnnnnnnnnnnnnnnnnnnnnnnnnnnnnnnnnnnnnnnnnnnnnnnnnnnnnnnnnnnnnnnnnnnnnnnnnnnnnnnnnnnnnnnnnnnnnnnnnnnnnnnnnnnnnnnnnnnnnnnnnnnnnnnnnnnnnnnnnnnnnnnnnnnnnnnnnnnnnnnnnnnnnnnnnnnnnnnnnnnnnnnnnnnnnnnnnnnnnnnnnnnnnnnnnnnnnnnnnnnnnnnnnnnnnnnnnnnnnnnnnnnnnnnnnnnnnnnnnnnnnnnnnnnnnnnnnnnnnnnnnnnnnnnnnnnnnnnnnnnnnnnnnnnnnnnnnnnnnnnnnnnnnnnnnnnnnnnnnnnnnnnnnnnnnnnnnnnnnnnnnnnnnnnnnnnnnnnnnnnnnnnnnnnnnnnnnnnnnnnnnnnnnnnnnnnnnnnnnnnnnnnnnnnnnnnnnnnnnnnnnnnnnnnnnnnnnnnnnnnnnnnnnnnnnnnnnnnnnnnnnnnnnnnnnnnnnnnnnnnnnnnnnnnnnnnnnnnnnnnnnnnnnnnnnnnnnnnnnnnnnnnnnnnnnnnnnnnnnnnnnnnnnnnnnnnnnnnnnnnnnnnnnnnnnnnnnnnnnnnnnnnnnnnnnnnnnnnnnnnnnnnnnnnnnnnnnnnnnnnnnnnnnnnnnnnnnnnnnnnnnnnnnnnnnnnnnnnnnnnnnnnnnnnnnnnnnnnnnnnnnnnnnnnnnnnnnnnnnnnnnnnnnnnnnnnnnnnnnnnnnnnnnnnnnnnnnnnnnnnnnnnnnnnnnnnnnnnnnnnnnnnnnnnnnnnnnnnnnnnnnnnnnnnnnnnnnnnnnnnnnnnnnnnnnnnnnnnnnnnnnnnnnnnnnnnnnnnnnnnnnnnnnnnnnnnnnnnnnnnnnnnnnnnnnnnnnnnnnnnnnnnnnnnnnnnnnnnnnnnnnnnnnnnnnnnnnnnnnnnnnnnnnnnnnnnnnnnnnnnnnnnnnnnnnnnnnnnnnnnnnnnnnnnnnnnnnnnnnnnnnnnnnnnnnnnnnnnnnnnnnnnnnnnnnnnnnnnnnnnnnnnnnnnnnnnnnnnnnnnnnnnnnnnnnnnnnnnnnnnnnnnnnnnnnnnnnnnnnnnnnnnnnnnnnnnnnnnnnnnnnnnnnnnnnnnnnnnnnnnnnnnnnnnnnnnnnnnnnnnnnnnnnnnnnnnnnnnnnnnnnnnnnnnnnnnnnnnnnnnnnnnnnnnnnnnnnnnnnnnnnnnnnnnnnnnnnnnnnnnnnnnnnnnnnnnnnnnnnnnnnnnnnnnnnnnnnnnnnnnnnnnnnnnnnnnnnnnnnnnnnnnnnnnnnnnnnnnnnnnnnnnnnnnnnnnnnnnnnnnnnnnnnnnnnnnnnnnnnnnnnnnnnnnnnnnnnnnnnnnnnnnnnnnnnnnnnnnnnnnnnnnnnnnnnnnnnnnnnnnnnnnnnnnnnnnnnnnnnnnnnnnnnnnnnnnnnnnnnnnnnnnnnnnnnnnnnnnnnnnnnnnnnnnnnnnnnnnnnnnnnnnnnnnnnnnnnnnnnnnnnnnnnnnnnnnnnnnnnnnnnnnnnnnnnnnnnnnnnnnnnnnnnnnnnnnnnnnnnnnnnnnnnnnnnnnnnnnnnnnnnnnnnnnnnnnnnnnnnnnnnnnnnnnnnnnnnnnnnnnnnnnnnnnnnnnnnnnnnnnnnnnnnnnnnnnnnnnnnnnnnnnnnnnnnnnnnnnnnnnnnnnnnnnnnnnnnnnnnnnnnnnnnnnnnnnnnnnnnnnnnnnnnnnnnnnnnnnnnnnnnnnnnnnnnnnnnnnnnnnnnnnnnnnnnnnnnnnnnnnnnnnnnnnnnnnnnnnnnnnnnnnnnnnnnnnnnnnnnnnnnnnnnnnnnnnnnnnnnnnnnnnnnnnnnnnnnnnnnnnnnnnnnnnnnnnnnnnnnnnnnnnnnnnnnnnnnnnnnnnnnnnnnnnnnnnnnnnnnnnnnnnnnnnnnnnnnnnnnnnnnnnnnnnnnnnnnnnnnnnnnnnnnnnnnnnnnnnnnnnnnnnnnnnnnnnnnnnnnnnnnnnnnnnnnnnnnnnnnnnnnnnnnnnnnnnnnnnnnnnnnnnnnnnnnnnnnnnnnnnnnnnnnnnnnnnnnnnnnnnnnnnnnnnnnnnnnnnnnnnnnnnnnnnnnnnnnnnnnnnnnnnnnnnnnnnnnnnnnnnnnnnnnnnnnnnnnnnnnnnnnnnnnnnnnnnnnnnnnnnnnnnnnnnnnnnnnnnnnnnnnnnnnnnnnnnnnnnnnnnnnnnnnnnnnnnnnnnnnnnnnnnnnnnnnnnnnnnnnnnnnnnnnnnnnnnnnnnnnnnnnnnnnnnnnnnnnnnnnnnnnnnnnnnnnnnnnnnnnnnnnnnnnnnnnnnnnnnnnnnnnnnnnnnnnnnnnnnnnnnnnnnnnnnnnnnnnnnnnnnnnnnnnnnnnnnnnnnnnnnnnnnnnnnnnnnnnnnnnnnnnnnnnnnnnnnnnnnnnnnnnnnnnnnnnnnnnnnnnnnnnnnnnnnnnnnnnnnnnnnnnnnnnnnnnnnnnnnnnnnnnnnnnnnnnnnnnnnnnnnnnnnnnnnnnnnnnnnnnnnnnnnnnnnnnnnnnnnnnnnnnnnnnnnnnnnnnnnnnnnnnnnnnnnnnnnnnnnnnnnnnnnnnnnnnnnnnnnnnnnnnnnnnnnnnnnnnnnnnnnnnnnnnnnnnnnnnnnnnnnnnnnnnnnnnnnnnnnnnnnnnnnnnnnnnnnnnnnnnnnnnnnnnnnnnnnnnnnnnnnnnnnnnnnnnnnnnnnnnnnnnnnnnnnnnnnnnnnnnnnnnnnnnnnnnnnnnnnnnnnnnnnnnnnnnnnnnnnnnnnnnnnnnnnnnnnnnnnnnnnnnnnnnnnnnnnnnnnnnnnnnnnnnnnnnnnnnnnnnnnnnnnnnnnnnnnnnnnnnnnnnnnnnnnnnnnnnnnnnnnnnnnnnnnnnnnnnnnnnnnnnnnnnnnnnnnnnnnnnnnnnnnnnnnnnnnnnnnnnnnnnnnnnnnnnnnnnnnnnnnnnnnnnnnnnnnnnnnnnnnnnnnnnnnnnnnnnnnnnnnnnnnnnnnnnnnnnnnnnnnnnnnnnnnnnnnnnnnnnnnnnnnnnnnnnnnnnnnnnnnnnnnnnnnnnnnnnnnnnnnnnnnnnnnnnnnnnnnnnnnnnnnnnnnnnnnnnnnnnnnnnnnnnnnnnnnnnnnnnnnnnnnnnnnnnnnnnnnnnnnnnnnnnnnnnnnnnnnnnnnnnnnnnnnnnnnnnnnnnnnnnnnnnnnnnnnnnnnnnnnnnnnnnnnnnnnnnnnnnnnnnnnnnnnnnnnnnnnnnnnnnnnnnnnnnnnnnnnnnnnnnnnnnnnnnnnnnnnnnnnnnnnnnnnnnnnnnnnnnnnnnnnnnnnnnnnnnnnnnnnnnnnnnnnnnnnnnnnnnnnnnnnnnnnnnnnnnnnnnnnnnnnnnnnnnnnnnnnnnnnnnnnnnnnnnnnnnnnnnnnnnnnnnnnnnnnnnnnnnnnnnnnnnnnnnnnnnnnnnnnnnnnnnnnnnnnnnnnnnnnnnnnnnnnnnnnnnnnnnnnnnnnnnnnnnnnnnnnnnnnnnnnnnnnnnnnnnnnnnnnnnnnnnnnnnnnnnnnnnnnnnnnnnnnnnnnnnnnnnnnnnnnnnnnnnnnnnnnnnnnnnnnnnnnnnnnnnnnnnnnnnnnnnnnnnnnnnnnnnnnnnnnnnnnnnnnnnnnnnnnnnnnnnnnnnnnnnnnnnnnnnnnnnnnnnnnnnnnnnnnnnnnnnnnnnnnnnnnnnnnnnnnnnnnnnnnnnnnnnnnnnnnnnnnnnnnnnnnnnnnnnnnnnnnnnnnnnnnnnnnnnnnnnnnnnnnnnnnnnnnnnnnnnnnnnnnnnnnnnnnnnnnnnnnnnnnnnnnnnnnnnnnnnnnnnnnnnnnnnnnnnnnnnnnnnnnnnnnnnnnnnnnnnnnnnnnnnnnnnnnnnnnnnnnnnnnnnnnnnnnnnnnnnnnnnnnnnnnnnnnnnnnnnnnnnnnnnnnnnnnnnnnnnnnnnnnnnnnnnnnnnnnnnnnnnnnnnnnnnnnnnnnnnnnnnnnnnnnnnnnnnnnnnnnnnnnnnnnnnnnnnnnnnnnnnnnnnnnnnnnnnnnnnnnnnnnnnnnnnnnnnnnnnnnnnnnnnnnnnnnnnnnnnnnnnnnnnnnnnnnnnnnnnnnnnnnnnnnnnnnnnnnnnnnnnnnnnnnnnnnnnnnnnnnnnnnnnnnnnnnnnnnnnnnnnnnnnnnnnnnnnnnnnnnnnnnnnnnnnnnnnnnnnnnnnnnnnnnnnnnnnnnnnnnnnnnnnnnnnnnnnnnnnnnnnnnnnnnnnnnnnnnnnnnnnnnnnnnnnnnnnnnnnnnnnnnnnnnnnnnnnnnnnnnnnnnnnnnnnnnnnnnnnnnnnnnnnnnnnnnnnnnnnnnnnnnnnnnnnnnnnnnnnnnnnnnnnnnnnnnnnnnnnnnnnnnnnnnnnnnnnnnnnnnnnnnnnnnnnnnnnnnnnnnnnnnnnnnnnnnnnnnnnnnnnnnnnnnnnnnnnnnnnnnnnnnnnnnnnnnnnnnnnnnnnnnnnnnnnnnnnnnnnnnnnnnnnnnnnnnnnnnnnnnnnnnnnnnnnnnnnnnnnnnnnnnnnnnnnnnnnnnnnnnnnnnnnnnnnnnnnnnnnnnnnnnnnnnnnnnnnnnnnnnnnnnnnnnnnnnnnnnnnnnnnnnnnnnnnnnnnnnnnnnnnnnnnnnnnnnnnnnnnnnnnnnnnnnnnnnnnnnnnnnnnnnnnnnnnnnnnnnnnnnnnnnnnnnnnnnnnnnnnnnnnnnnnnnnnnnnnnnnnnnnnnnnnnnnnnnnnnnnnnnnnnnnnnnnnnnnnnnnnnnnnnnnnnnnnnnnnnnnnnnnnnnnnnnnnnnnnnnnnnnnnnnnnnnnnnnnnnnnnnnnnnnnnnnnnnnnnnnnnnnnnnnnnnnnnnnnnnnnnnnnnnnnnnnnnnnnnnnnnnnnnnnnnnnnnnnnnnnnnnnnnnnnnnnnnnnnnnnnnnnnnnnnnnnnnnnnnnnnnnnnnnnnnnnnnnnnnnnnnnnnnnnnnnnnnnnnnnnnnnnnnnnnnnnnnnnnnnnnnnnnnnnnnnnnnnnnnnnnnnnnnnnnnnnnnnnnnnnnnnnnnnnnnnnnnnnnnnnnnnnnnnnnnnnnnnnnnnnnnnnnnnnnnnnnnnnnnnnnnnnnnnnnnnnnnnnnnnnnnnnnnnnnnnnnnnnnnnnnnnnnnnnnnnnnnnnnnnnnnnnnnnnnnnnnnnnnnnnnnnnnnnnnnnnnnnnnnnnnnnnnnnnnnnnnnnnnnnnnnnnnnnnnnnnnnnnnnnnnnnnnnnnnnnnnnnnnnnnnnnnnnnnnnnnnnnnnnnnnnnnnnnnnnnnnnnnnnnnnnnnnnnnnnnnnnnnnnnnnnnnnnnnnnnnnnnnnnnnnnnnnnnnnnnnnnnnnnnnnnnnnnnnnnnnnnnnnnnnnnnnnnnnnnnnnnnnnnnnnnnnnnnnnnnnnnnnnnnnnnnnnnnnnnnnnnnnnnnnnnnnnnnnnnnnnnnnnnnnnnnnnnnnnnnnnnnnnnnnnnnnnnnnnnnnnnnnnnnnnnnnnnnnnnnnnnnnnnnnnnnnnnnnnnnnnnnnnnnnnnnnnnnnnnnnnnnnnnnnnnnnnnnnnnnnnnnnnnnnnnnnnnnnnnnnnnnnnnnnnnnnnnnnnnnnnnnnnnnnnnnnnnnnnnnnnnnnnnnnnnnnnnnnnnnnnnnnnnnnnnnnnnnnnnnnnnnnnnnnnnnnnnnnnnnnnnnnnnnnnnnnnnnnnnnnnnnnnnnnnnnnnnnnnnnnnnnnnnnnnnnnnnnnnnnnnnnnnnnnnnnnnnnnnnnnnnnnnnnnnnnnnnnnnnnnnnnnnnnnnnnnnnnnnnnnnnnnnnnnnnnnnnnnnnnnnnnnnnnnnnnnnnnnnnnnnnnnnnnnnnnnnnnnnnnnnnnnnnnnnnnnnnnnnnnnnnnnnnnnnnnnnnnnnnnnnnnnnnnnnnnnnnnnnnnnnnnnnnnnnnnnnnnnnnnnnnnnnnnnnnnnnnnnnnnnnnnnnnnnnnnnnnnnnnnnnnnnnnnnnnnnnnnnnnnnnnnnnnnnnnnnnnnnnnnnnnnnnnnnnnnnnnnnnnnnnnnnnnnnnnnnnnnnnnnnnnnnnnnnnnnnnnnnnnnnnnnnnnnnnnnnnnnnnnnnnnnnnnnnnnnnnnnnnnnnnnnnnnnnnnnnnnnnnnnnnnnnnnnnnnnnnnnnnnnnnnnnnnnnnnnnnnnnnnnnnnnnnnnnnnnnnnnnnnnnnnnnnnnnnnnnnnnnnnnnnnnnnnnnnnnnnnnnnnnnnnnnnnnnnnnnnnnnnnnnnnnnnnnnnnnnnnnnnnnnnnnnnnnnnnnnnnnnnnnnnnnnnnnnnnnnnnnnnnnnnnnnnnnnnnnnnnnnnnnnnnnnnnnnnnnnnnnnnnnnnnnnnnnnnnnnnnnnnnnnnnnnnnnnnnnnnnnnnnnnnnnnnnnnnnnnnnnnnnnnnnnnnnnnnnnnnnnnnnnnnnnnnnnnnnnnnnnnnnnnnnnnnnnnnnnnnnnnnnnnnnnnnnnnnnnnnnnnnnnnnnnnnnnnnnnnnnnnnnnnnnnnnnnnnnnnnnnnnnnnnnnnnnnnnnnnnnnnnnnnnnnnnnnnnnnnnnnnnnnnnnnnnnnnnnnnnnnnnnnnnnnnnnnnnnnnnnnnnnnnnnnnnnnnnnnnnnnnnnnnnnnnnnnnnnnnnnnnnnnnnnnnnnnnnnnnnnnnnnnnnnnnnnnnnnnnnnnnnnnnnnnnnnnnnnnnnnnnnnnnnnnnnnnnnnnnnnnnnnnnnnnnnnnnnnnnnnnnnnnnnnnnnnnnnnnnnnnnnnnnnnnnnnnnnnnnnnnnnnnnnnnnnnnnnnnnnnnnnnnnnnnnnnnnnnnnnnnnnnnnnnnnnnnnnnnnnnnnnnnnnnnnnnnnnnnnnnnnnnnnnnnnnnnnnnnnnnnnnnnnnnnnnnnnnnnnnnnnnnnnnnnnnnnnnnnnnnnnnnnnnnnnnnnnnnnnnnnnnnnnnnnnnnnnnnnnnnnnnnnnnnnnnnnnnnnnnnnnnnnnnnnnnnnnnnnnnnnnnnnnnnnnnnnnnnnnnnnnnnnnnnnnnnnnnnnnnnnnnnnnnnnnnnnnnnnnnnnnnnnnnnnnnnnnnnnnnnnnnnnnnnnnnnnnnnnnnnnnnnnnnnnnnnnnnnnnnnnnnnnnnnnnnnnnnnnnnnnnnnnnnnnnnnnnnnnnnnnnnnnnnnnnnnnnnnnnnnnnnnnnnnnnnnnnnnnnnnnnnnnnnnnnnnnnnnnnnnnnnnnnnnnnnnnnnnnnnnnnnnnnnnnnnnnnnnnnnnnnnnnnnnnnnnnnnnnnnnnnnnnnnnnnnnnnnnnnnnnnnnnnnnnnnnnnnnnnnnnnnnnnnnnnnnnnnnnnnnnnnnnnnnnnnnnnnnnnnnnnnnnnnnnnnnnnnnnnnnnnnnnnnnnnnnnnnnnnnnnnnnnnnnnnnnnnnnnnnnnnnnnnnnnnnnnnnnnnnnnnnnnnnnnnnnnnnnnnnnnnnnnnnnnnnnnnnnnnnnnnnnnnnnnnnnnnnnnnnnnnnnnnnnnnnnnnnnnnnnnnnnnnnnnnnnnnnnnnnnnnnnnnnnnnnnnnnnnnnnnnnnnnnnnnnnnnnnnnnnnnnnnnnnnnnnnnnnnnnnnnnnnnnnnnnnnnnnnnnnnnnnnnnnnnnnnnnnnnnnnnnnnnnnnnnnnnnnnnnnnnnnnnnnnnnnnnnnnnnnnnnnnnnnnnnnnnnnnnnnnnnnnnnnnnnnnnnnnnnnnnnnnnnnnnnnnnnnnnnnnnnnnnnnnnnnnnnnnnnnnnnnnnnnnnnnnnnnnnnnnnnnnnnnnnnnnnnnnnnnnnnnnnnnnnnnnnnnnnnnnnnnnnnnnnnnnnnnnnnnnnnnnnnnnnnnnnnnnnnnnnnnnnnnnnnnnnnnnnnnnnnnnnnnnnnnnnnnnnnnnnnnnnnnnnnnnnnnnnnnnnnnnnnnnnnnnnnnnnnnnnnnnnnnnnnnnnnnnnnnnnnnnnnnnnnnnnnnnnnnnnnnnnnnnnnnnnnnnnnnnnnnnnnnnnnnnnnnnnnnnnnnnnnnnnnnnnnnnnnnnnnnnnnnnnnnnnnnnnnnnnnnnnnnnnnnnnnnnnnnnnnnnnnnnnnnnnnnnnnnnnnnnnnnnnnnnnnnnnnnnnnnnnnnnnnnnnnnnnnnnnnnnnnnnnnnnnnnnnnnnnnnnnnnnnnnnnnnnnnnnnnnnnnnnnnnnnnnnnnnnnnnnnnnnnnnnnnnnnnnnnnnnnnnnnnnnnnnnnnnnnnnnnnnnnnnnnnnnnnnnnnnnnnnnnnnnnnnnnnnnnnnnnnnnnnnnnnnnnnnnnnnnnnnnnnnnnnnnnnnnnnnnnnnnnnnnnnnnnnnnnnnnnnnnnnnnnnnnnnnnnnnnnnnnnnnnnnnnnnnnnnnnnnnnnnnnnnnnnnnnnnnnnnnnnnnnnnnnnnnnnnnnnnnnnnnnnnnnnnnnnnnnnnnnnnnnnnnnnnnnnnnnnnnnnnnnnnnnnnnnnnnnnnnnnnnnnnnnnnnnnnnnnnnnnnnnnnnnnnnnnnnnnnnnnnnnnnnnnnnnnnnnnnnnnnnnnnnnnnnnnnnnnnnnnnnnnnnnnnnnnnnnnnnnnnnnnnnnnnnnnnnnnnnnnnnnnnnnnnnnnnnnnnnnnnnnnnnnnnnnnnnnnnnnnnnnnnnnnnnnnnnnnnnnnnnnnnnnnnnnnnnnnnnnnnnnnnnnnnnnnnnnnnnnnnnnnnnnnnnnnnnnnnnnnnnnnnnnnnnnnnnnnnnnnnnnnnnnnnnnnnnnnnnnnnnnnnnnnnnnnnnnnnnnnnnnnnnnnnnnnnnnnnnnnnnnnnnnnnnnnnnnnnnnnnnnnnnnnnnnnnnnnnnnnnnnnnnnnnnnnnnnnnnnnnnnnnnnnnnnnnnnnnnnnnnnnnnnnnnnnnnnnnnnnnnnnnnnnnnnnnnnnnnnnnnnnnnnnnnnnnnnnnnnnnnnnnnnnnnnnnnnnnnnnnnnnnnnnnnnnnnnnnnnnnnnnnnnnnnnnnnnnnnnnnnnnnnnnnnnnnnnnnnnnnnnnnnnnnnnnnnnnnnnnnnnnnnnnnnnnnnnnnnnnnnnnnnnnnnnnnnnnnnnnnnnnnnnnnnnnnnnnnnnnnnnnnnnnnnnnnnnnnnnnnnnnnnnnnnnnnnnnnnnnnnnnnnnnnnnnnnnnnnnnnnnnnnnnnnnnnnnnnnnnnnnnnnnnnnnnnnnnnnnnnnnnnnnnnnnnnnnnnnnnnnnnnnnnnnnnnnnnnnnnnnnnnnnnnnnnnnnnnnnnnnnnnnnnnnnnnnnnnnnnnnnnnnnnnnnnnnnnnnnnnnnnnnnnnnnnnnnnnnnnnnnnnnnnnnnnnnnnnnnnnnnnnnnnnnnnnnnnnnnnnnnnnnnnnnnnnnnnnnnnnnnnnnnnnnnnnnnnnnnnnnnnnnnnnnnnnnnnnnnnnnnnnnnnnnnnnnnnnnnnnnnnnnnnnnnnnnnnnnnnnnnnnnnnnnnnnnnnnnnnnnnnnnnnnnnnnnnnnnnnnnnnnnnnnnnnnnnnnnnnnnnnnnnnnnnnnnnnnnnnnnnnnnnnnnnnnnnnnnnnnnnnnnnnnnnnnnnnnnnnnnnnnnnnnnnnnnnnnnnnnnnnnnnnnnnnnnnnnnnnnnnnnnnnnnnnnnnnnnnnnnnnnnnnnnnnnnnnnnnnnnnnnnnnnnnnnnnnnnnnnnnnnnnnnnnnnnnnnnnnnnnnnnnnnnnnnnnnnnnnnnnnnnnnnnnnnnnnnnnnnnnnnnnnnnnnnnnnnnnnnnnnnnnnnnnnnnnnnnnnnnnnnnnnnnnnnnnnnnnnnnnnnnnnnnnnnnnnnnnnnnnnnnnnnnnnnnnnnnnnnnnnnnnnnnnnnnnnnnnnnnnnnnnnnnnnnnnnnnnnnnnnnnnnnnnnnnnnnnnnnnnnnnnnnnnnnnnnnnnnnnnnnnnnnnnnnnnnnnnnnnnnnnnnnnnnnnnnnnnnnnnnnnnnnnnnnnnnnnnnnnnnnnnnnnnnnnnnnnnnnnnnnnnnnnnnnnnnnnnnnnnnnnnnnnnnnnnnnnnnnnnnnnnnnnnnnnnnnnnnnnnnnnnnnnnnnnnnnnnnnnnnnnnnnnnnnnnnnnnnnnnnnnnnnnnnnnnnnnnnnnnnnnnnnnnnnnnnnnnnnnnnnnnnnnnnnnnnnnnnnnnnnnnnnnnnnnnnnnnnnnnnnnnnnnnnnnnnnnnnnnnnnnnnnnnnnnnnnnnnnnnnnnnnnnnnnnnnnnnnnnnnnnnnnnnnnnnnnnnnnnnnnnnnnnnnnnnnnnnnnnnnnnnnnnnnnnnnnnnnnnnnnnnnnnnnnnnnnnnnnnnnnnnnnnnnnnnnnnnnnnnnnnnnnnnnnnnnnnnnnnnnnnnnnnnnnnnnnnnnnnnnnnnnnnnnnnnnnnnnnnnnnnnnnnnnnnnnnnnnnnnnnnnnnnnnnnnnnnnnnnnnnnnnnnnnnnnnnnnnnnnnnnnnnnnnnnnnnnnnnnnnnnnnnnnnnnnnnnnnnnnnnnnnnnnnnnnnnnnnnnnnnnnnnnnnnnnnnnnnnnnnnnnnnnnnnnnnnnnnnnnnnnnnnnnnnnnnnnnnnnnnnnnnnnnnnnnnnnnnnnnnnnnnnnnnnnnnnnnnnnnnnnnnnnnnnnnnnnnnnnnnnnnnnnnnnnnnnnnnnnnnnnnnnnnnnnnnnnnnnnnnnnnnnnnnnnnnnnnnnnnnnnnnnnnnnnnnnnnnnnnnnnnnnnnnnnnnnnnnnnnnnnnnnnnnnnnnnnnnnnnnnnnnnnnnnnnnnnnnnnnnnnnnnnnnnnnnnnnnnnnnnnnnnnnnnnnnnnnnnnnnnnnnnnnnnnnnnnnnnnnnnnnnnnnnnnnnnnnnnnnnnnnnnnnnnnnnnnnnnnnnnnnnnnnnnnnnnnnnnnnnnnnnnnnnnnnnnnnnnnnnnnnnnnnnnnnnnnnnnnnnnnnnnnnnnnnnnnnnnnnnnnnnnnnnnnnnnnnnnnnnnnnnnnnnnnnnnnnnnnnnnnnnnnnnnnnnnnnnnnnnnnnnnnnnnnnnnnnnnnnnnnnnnnnnnnnnnnnnnnnnnnnnnnnnnnnnnnnnnnnnnnnnnnnnnnnnnnnnnnnnnnnnnnnnnnnnnnnnnnnnnnnnnnnnnnnnnnnnnnnnnnnnnnnnnnnnnnnnnnnnnnnnnnnnnnnnnnnnnnnnnnnnnnnnnnnnnnnnnnnnnnnnnnnnnnnnnnnnnnnnnnnnnnnnnnnnnnnnnnnnnnnnnnnnnnnnnnnnnnnnnnnnnnnnnnnnnnnnnnnnnnnnnnnnnnnnnnnnnnnnnnnnnnnnnnnnnnnnnnnnnnnnnnnnnnnnnnnnnnnnnnnnnnnnnnnnnnnnnnnnnnnnnnnnnnnnnnnnnnnnnnnnnnnnnnnnnnnnnnnnnnnnnnnnnnnnnnnnnnnnnnnnnnnnnnnnnnnnnnnnnnnnnnnnnnnnnnnnnnnnnnnnnnnnnnnnnnnnnnnnnnnnnnnnnnnnnnnnnnnnnnnnnnnnnnnnnnnnnnnnnnnnnnnnnnnnnnnnnnnnnnnnnnnnnnnnnnnnnnnnnnnnnnnnnnnnnnnnnnnnnnnnnnnnnnnnnnnnnnnnnnnnnnnnnnnnnnnnnnnnnnnnnnnnnnnnnnnnnnnnnnnnnnnnnnnnnnnnnnnnnnnnnnnnnnnnnnnnnnnnnnnnnnnnnnnnnnnnnnnnnnnnnnnnnnnnnnnnnnnnnnnnnnnnnnnnnnnnnnnnnnnnnnnnnnnnnnnnnnnnnnnnnnnnnnnnnnnnnnnnnnnnnnnnnnnnnnnnnnnnnnnnnnnnnnnnnnnnnnnnnnnnnnnnnnnnnnnnnnnnnnnnnnnnnnnnnnnnnnnnnnnnnnnnnnnnnnnnnnnnnnnnnnnnnnnnnnnnnnnnnnnnnnnnnnnnnnnnnnnnnnnnnnnnnnnnnnnnnnnnnnnnnnnnnnnnnnnnnnnnnnnnnnnnnnnnnnnnnnnnnnnnnnnnnnnnnnnnnnnnnnnnnnnnnnnnnnnnnnnnnnnnnnnnnnnnnnnnnnnnnnnnnnnnnnnnnnnnnnnnnnnnnnnnnnnnnnnnnnnnnnnnnnnnnnnnnnnnnnnnnnnnnnnnnnnnnnnnnnnnnnnnnnnnnnnnnnnnnnnnnnnnnnnnnnnnnnnnnnnnnnnnnnnnnnnnnnnnnnnnnnnnnnnnnnnnnnnnnnnnnnnnnnnnnnnnnnnnnnnnnnnnnnnnnnnnnnnnnnnnnnnnnnnnnnnnnnnnnnnnnnnnnnnnnnnnnnnnnnnnnnnnnnnnnnnnnnnnnnnnnnnnnnnnnnnnnnnnnnnnnnnnnnnnnnnnnnnnnnnnnnnnnnnnnnnnnnnnnnnnnnnnnnnnnnnnnnnnnnnnnnnnnnnnnnnnnnnnnnnnnnnnnnnnnnnnnnnnnnnnnnnnnnnnnnnnnnnnnnnnnnnnnnnnnnnnnnnnnnnnnnnnnnnnnnnnnnnnnnnnnnnnnnnnnnnnnnnnnnnnnnnnnnnnnnnnnnnnnnnnnnnnnnnnnnnnnnnnnnnnnnnnnnnnnnnnnnnnnnnnnnnnnnnnnnnnnnnnnnnnnnnnnnnnnnnnnnnnnnnnnnnnnnnnnnnnnnnnnnnnnnnnnnnnnnnnnnnnnnnnnnnnnnnnnnnnnnnnnnnnnnnnnnnnnnnnnnnnnnnnnnnnnnnnnnnnnnnnnnnnnnnnnnnnnnnnnnnnnnnnnnnnnnnnnnnnnnnnnnnnnnnnnnnnnnnnnnnnnnnnnnnnnnnnnnnnnnnnnnnnnnnnnnnnnnnnnnnnnnnnnnnnnnnnnnnnnnnnnnnnnnnnnnnnnnnnnnnnnnnnnnnnnnnnnnnnnnnnnnnnnnnnnnnnnnnnnnnnnnnnnnnnnnnnnnnnnnnnnnnnnnnnnnnnnnnnnnnnnnnnnnnnnnnnnnnnnnnnnnnnnnnnnnnnnnnnnnnnnnnnnnnnnnnnnnnnnnnnnnnnnnnnnnnnnnnnnnnnnnnnnnnnnnnnnnnnnnnnnnnnnnnnnnnnnnnnnnnnnnnnnnnnnnnnnnnnnnnnnnnnnnnnnnnnnnnnnnnnnnnnnnnnnnnnnnnnnnnnnnnnnnnnnnnnnnnnnnnnnnnnnnnnnnnnnnnnnnnnnnnnnnnnnnnnnnnnnnnnnnnnnnnnnnnnnnnnnnnnnnnnnnnnnnnnnnnnnnnnnnnnnnnnnnnnnnnnnnnnnnnnnnnnnnnnnnnnnnnnnnnnnnnnnnnnnnnnnnnnnnnnnnnnnnnnnnnnnnnnnnnnnnnnnnnnnnnnnnnnnnnnnnnnnnnnnnnnnnnnnnnnnnnnnnnnnnnnnnnnnnnnnnnnnnnnnnnnnnnnnnnnnnnnnnnnnnnnnnnnnnnnnnnnnnnnnnnnnnnnnnnnnnnnnnnnnnnnnnnnnnnnnnnnnnnnnnnnnnnnnnnnnnnnnnnnnnnnnnnnnnnnnnnnnnnnnnnnnnnnnnnnnnnnnnnnnnnnnnnnnnnnnnnnnnnnnnnnnnnnnnnnnnnnnnnnnnnnnnnnnnnnnnnnnnnnnnnnnnnnnnnnnnnnnnnnnnnnnnnnnnnnnnnnnnnnnnnnnnnnnnnnnnnnnnnnnnnnnnnnnnnnnnnnnnnnnnnnnnnnnnnnnnnnnnnnnnnnnnnnnnnnnnnnnnnnnnnnnnnnnnnnnnnnnnnnnnnnnnnnnnnnnnnnnnnnnnnnnnnnnnnnnnnnnnnnnnnnnnnnnnnnnnnnnnnnnnnnnnnnnnnnnnnnnnnnnnnnnnnnnnnnnnnnnnnnnnnnnnnnnnnnnnnnnnnnnnnnnnnnnnnnnnnnnnnnnnnnnnnnnnnnnnnnnnnnnnnnnnnnnnnnnnnnnnnnnnnnnnnnnnnnnnnnnnnnnnnnnnnnnnnnnnnnnnnnnnnnnnnnnnnnnnnnnnnnnnnnnnnnnnnnnnnnnnnnnnnnnnnnnnnnnnnnnnnnnnnnnnnnnnnnnnnnnnnnnnnnnnnnnnnnnnnnnnnnnnnnnnnnnnnnnnnnnnnnnnnnnnnnnnnnnnnnnnnnnnnnnnnnnnnnnnnnnnnnnnnnnnnnnnnnnnnnnnnnnnnnnnnnnnnnnnnnnnnnnnnnnnnnnnnnnnnnnnnnnnnnnnnnnnnnnnnnnnnnnnnnnnnnnnnnnnnnnnnnnnnnnnnnnnnnnnnnnnnnnnnnnnnnnnnnnnnnnnnnnnnnnnnnnnnnnnnnnnnnnnnnnnnnnnnnnnnnnnnnnnnnnnnnnnnnnnnnnnnnnnnnnnnnnnnnnnnnnnnnnnnnnnnnnnnnnnnnnnnnnnnnnnnnnnnnnnnnnnnnnnnnnnnnnnnnnnnnnnnnnnnnnnnnnnnnnnnnnnnnnnnnnnnnnnnnnnnnnnnnnnnnnnnnnnnnnnnnnnnnnnnnnnnnnnnnnnnnnnnnnnnnnnnnnnnnnnnnnnnnnnnnnnnnnnnnnnnnnnnnnnnnnnnnnnnnnnnnnnnnnnnnnnnnnnnnnnnnnnnnnnnnnnnnnnnnnnnnnnnnnnnnnnnnnnnnnnnnnnnnnnnnnnnnnnnnnnnnnnnnnnnnnnnnnnnnnnnnnnnnnnnnnnnnnnnnnnnnnnnnnnnnnnnnnnnnnnnnnnnnnnnnnnnnnnnnnnnnnnnnnnnnnnnnnnnnnnnnnnnnnnnnnnnnnnnnnnnnnnnnnnnnnnnnnnnnnnnnnnnnnnnnnnnnnnnnnnnnnnnnnnnnnnnnnnnnnnnnnnnnnnnnnnnnnnnnnnnnnnnnnnnnnnnnnnnnnnnnnnnnnnnnnnnnnnnnnnnnnnnnnnnnnnnnnnnnnnnnnnnnnnnnnnnnnnnnnnnnnnnnnnnnnnnnnnnnnnnnnnnnnnnnnnnnnnnnnnnnnnnnnnnnnnnnnnnnnnnnnnnnnnnnnnnnnnnnnnnnnnnnnnnnnnnnnnnnnnnnnnnnnnnnnnnnnnnnnnnnnnnnnnnnnnnnnnnnnnnnnnnnnnnnnnnnnnnnnnnnnnnnnnnnnnnnnnnnnnnnnnnnnnnnnnnnnnnnnnnnnnnnnnnnnnnnnnnnnnnnnnnnnnnnnnnnnnnnnnnnnnnnnnnnnnnnnnnnnnnnnnnnnnnnnnnnnnnnnnnnnnnnnnnnnnnnnnnnnnnnnnnnnnnnnnnnnnnnnnnnnnnnnnnnnnnnnnnnnnnnnnnnnnnnnnnnnnnnnnnnnnnnnnnnnnnnnnnnnnnnnnnnnnnnnnnnnnnnnnnnnnnnnnnnnnnnnnnnnnnnnnnnnnnnnnnnnnnnnnnnnnnnnnnnnnnnnnnnnnnnnnnnnnnnnnnnnnnnnnnnnnnnnnnnnnnnnnnnnnnnnnnnnnnnnnnnnnnnnnnnnnnnnnnnnnnnnnnnnnnnnnnnnnnnnnnnnnnnnnnnnnnnnnnnnnnnnnnnnnnnnnnnnnnnnnnnnnnnnnnnnnnnnnnnnnnnnnnnnnnnnnnnnnnnnnnnnnnnnnnnnnnnnnnnnnnnnnnnnnnnnnnnnnnnnnnnnnnnnnnnnnnnnnnnnnnnnnnnnnnnnnnnnnnnnnnnnnnnnnnnnnnnnnnnnnnnnnnnnnnnnnnnnnnnnnnnnnnnnnnnnnnnnnnnnnnnnnnnnnnnnnnnnnnnnnnnnnnnnnnnnnnnnnnnnnnnnnnnnnnnnnnnnnnnnnnnnnnnnnnnnnnnnnnnnnnnnnnnnnnnnnnnnnnnnnnnnnnnnnnnnnnnnnnnnnnnnnnnnnnnnnnnnnnnnnnnnnnnnnnnnnnnnnnnnnnnnnnnnnnnnnnnnnnnnnnnnnnnnnnnnnnnnnnnnnnnnnnnnnnnnnnnnnnnnnnnnnnnnnnnnnnnnnnnnnnnnnnnnnnnnnnnnnnnnnnnnnnnnnnnnnnnnnnnnnnnnnnnnnnnnnnnnnnnnnnnnnnnnnnnnnnnnnnnnnnnnnnnnnnnnnnnnnnnnnnnnnnnnnnnnnnnnnnnnnnnnnnnnnnnnnnnnnnnnnnnnnnnnnnnnnnnnnnnnnnnnnnnnnnnnnnnnnnnnnnnnnnnnnnnnnnnnnnnnnnnnnnnnnnnnnnnnnnnnnnnnnnnnnnnnnnnnnnnnnnnnnnnnnnnnnnnnnnnnnnnnnnnnnnnnnnnnnnnnnnnnnnnnnnnnnnnnnnnnnnnnnnnnnnnnnnnnnnnnnnnnnnnnnnnnnnnnnnnnnnnnnnnnnnnnnnnnnnnnnnnnnnnnnnnnnnnnnnnnnnnnnnnnnnnnnnnnnnnnnnnnnnnnnnnnnnnnnnnnnnnnnnnnnnnnnnnnnnnnnnnnnnnnnnnnnnnnnnnnnnnnnnnnnnnnnnnnnnnnnnnnnnnnnnnnnnnnnnnnnnnnnnnnnnnnnnnnnnnnnnnnnnnnnnnnnnnnnnnnnnnnnnnnnnnnnnnnnnnnnnnnnnnnnnnnnnnnnnnnnnnnnnnnnnnnnnnnnnnnnnnnnnnnnnnnnnnnnnnnnnnnnnnnnnnnnnnnnnnnnnnnnnnnnnnnnnnnnnnnnnnnnnnnnnnnnnnnnnnnnnnnnnnnnnnnnnnnnnnnnnnnnnnnnnnnnnnnnnnnnnnnnnnnnnnnnnnnnnnnnnnnnnnnnnnnnnnnnnnnnnnnnnnnnnnnnnnnnnnnnnnnnnnnnnnnnnnnnnnnnnnnnnnnnnnnnnnnnnnnnnnnnnnnnnnnnnnnnnnnnnnnnnnnnnnnnnnnnnnnnnnnnnnnnnnnnnnnnnnnnnnnnnnnnnnnnnnnnnnnnnnnnnnnnnnnnnnnnnnnnnnnnnnnnnnnnnnnnnnnnnnnnnnnnnnnnnnnnnnnnnnnnnnnnnnnnnnnnnnnnnnnnnnnnnnnnnnnnnnnnnnnnnnnnnnnnnnnnnnnnnnnnnnnnnnnnnnnnnnnnnnnnnnnnnnnnnnnnnnnnnnnnnnnnnnnnnnnnnnnnnnnnnnnnnnnnnnnnnnnnnnnnnnnnnnnnnnnnnnnnnnnnnnnnnnnnnnnnnnnnnnnnnnnnnnnnnnnnnnnnnnnnnnnnnnnnnnnnnnnnnnnnnnnnnnnnnnnnnnnnnnnnnnnnnnnnnnnnnnnnnnnnnnnnnnnnnnnnnnnnnnnnnnnnnnnnnnnnnnnnnnnnnnnnnnnnnnnnnnnnnnnnnnnnnnnnnnnnnnnnnnnnnnnnnnnnnnnnnnnnnnnnnnnnnnnnnnnnnnnnnnnnnnnnnnnnnnnnnnnnnnnnnnnnnnnnnnnnnnnnnnnnnnnnnnnnnnnnnnnnnnnnnnnnnnnnnnnnnnnnnnnnnnnnnnnnnnnnnnnnnnnnnnnnnnnnnnnnnnnnnnnnnnnnnnnnnnnnnnnnnnnnnnnnnnnnnnnnnnnnnnnnnnnnnnnnnnnnnnnnnnnnnnnnnnnnnnnnnnnnnnnnnnnnnnnnnnnnnnnnnnnnnnnnnnnnnnnnnnnnnnnnnnnnnnnnnnnnnnnnnnnnnnnnnnnnnnnnnnnnnnnnnnnnnnnnnnnnnnnnnnnnnnnnnnnnnnnnnnnnnnnnnnnnnnnnnnnnnnnnnnnnnnnnnnnnnnnnnnnnnnnnnnnnnnnnnnnnnnnnnnnnnnnnnnnnnnnnnnnnnnnnnnnnnnnnnnnnnnnnnnnnnnnnnnnnnnnnnnnnnnnnnnnnnnnnnnnnnnnnnnnnnnnnnnnnnnnnnnnnnnnnnnnnnnnnnnnnnnnnnnnnnnnnnnnnnnnnnnnnnnnnnnnnnnnnnnnnnnnnnnnnnnnnnnnnnnnnnnnnnnnnnnnnnnnnnnnnnnnnnnnnnnnnnnnnnnnnnnnnnnnnnnnnnnnnnnnnnnnnnnnnnnnnnnnnnnnnnnnnnnnnnnnnnnnnnnnnnnnnnnnnnnnnnnnnnnnnnnnnnnnnnnnnnnnnnnnnnnnnnnnnnnnnnnnnnnnnnnnnnnnnnnnnnnnnnnnnnnnnnnnnnnnnnnnnnnnnnnnnnnnnnnnnnnnnnnnnnnnnnnnnnnnnnnnnnnnnnnnnnnnnnnnnnnnnnnnnnnnnnnnnnnnnnnnnnnnnnnnnnnnnnnnnnnnnnnnnnnnnnnnnnnnnnnnnnnnnnnnnnnnnnnnnnnnnnnnnnnnnnnnnnnnnnnnnnnnnnnnnnnnnnnnnnnnnnnnnnnnnnnnnnnnnnnnnnnnnnnnnnnnnnnnnnnnnnnnnnnnnnnnnnnnnnnnnnnnnnnnnnnnnnnnnnnnnnnnnnnnnnnnnnnnnnnnnnnnnnnnnnnnnnnnnnnnnnnnnnnnnnnnnnnnnnnnnnnnnnnnnnnnnnnnnnnnnnnnnnnnnnnnnnnnnnnnnnnnnnnnnnnnnnnnnnnnnnnnnnnnnnnnnnnnnnnnnnnnnnnnnnnnnnnnnnnnnnnnnnnnnnnnnnnnnnnnnnnnnnnnnnnnnnnnnnnnnnnnnnnnnnnnnnnnnnnnnnnnnnnnnnnnnnnnnnnnnnnnnnnnnnnnnnnnnnnnnnnnnnnnnnnnnnnnnnnnnnnnnnnnnnnnnnnnnnnnnnnnnnnnnnnnnnnnnnnnnnnnnnnnnnnnnnnnnnnnnnnnnnnnnnnnnnnnnnnnnnnnnnnnnnnnnnnnnnnnnnnnnnnnnnnnnnnnnnnnnnnnnnnnnnnnnnnnnnnnnnnnnnnnnnnnnnnnnnnnnnnnnnnnnnnnnnnnnnnnnnnnnnnnnnnnnnnnnnnnnnnnnnnnnnnnnnnnnnnnnnnnnnnnnnnnnnnnnnnnnnnnnnnnnnnnnnnnnnnnnnnnnnnnnnnnnnnnnnnnnnnnnnnnnnnnnnnnnnnnnnnnnnnnnnnnnnnnnnnnnnnnnnnnnnnnnnnnnnnnnnnnnnnnnnnnnnnnnnnnnnnnnnnnnnnnnnnnnnnnnnnnnnnnnnnnnnnnnnnnnnnnnnnnnnnnnnnnnnnnnnnnnnnnnnnnnnnnnnnnnnnnnnnnnnnnnnnnnnnnnnnnnnnnnnnnnnnnnnnnnnnnnnnnnnnnnnnnnnnnnnnnnnnnnnnnnnnnnnnnnnnnnnnnnnnnnnnnnnnnnnnnnnnnnnnnnnnnnnnnnnnnnnnnnnnnnnnnnnnnnnnnnnnnnnnnnnnnnnnnnnnnnnnnnnnnnnnnnnnnnnnnnnnnnnnnnnnnnnnnnnnnnnnnnnnnnnnnnnnnnnnnnnnnnnnnnnnnnnnnnnnnnnnnnnnnnnnnnnnnnnnnnnnnnnnnnnnnnnnnnnnnnnnnnnnnnnnnnnnnnnnnnnnnnnnnnnnnnnnnnnnnnnnnnnnnnnnnnnnnnnnnnnnnnnnnnnnnnnnnnnnnnnnnnnnnnnnnnnnnnnnnnnnnnnnnnnnnnnnnnnnnnnnnnnnnnnnnnnnnnnnnnnnnnnnnnnnnnnnnnnnnnnnnnnnnnnnnnnnnnnnnnnnnnnnnnnnnnnnnnnnnnnnnnnnnnnnnnnnnnnnnnnnnnnnnnnnnnnnnnnnnnnnnnnnnnnnnnnnnnnnnnnnnnnnnnnnnnnnnnnnnnnnnnnnnnnnnnnnnnnnnnnnnnnnnnnnnnnnnnnnnnnnnnnnnnnnnnnnnnnnnnnnnnnnnnnnnnnnnnnnnnnnnnnnnnnnnnnnnnnnnnnnnnnnnnnnnnnnnnnnnnnnnnnnnnnnnnnnnnnnnnnnnnnnnnnnnnnnnnnnnnnnnnnnnnnnnnnnnnnnnnnnnnnnnnnnnnnnnnnnnnnnnnnnnnnnnnnnnnnnnnnnnnnnnnnnnnnnnnnnnnnnnnnnnnnnnnnnnnnnnnnnnnnnnnnnnnnnnnnnnnnnnnnnnnnnnnnnnnnnnnnnnnnnnnnnnnnnnnnnnnnnnnnnnnnnnnnnnnnnnnnnnnnnnnnnnnnnnnnnnnnnnnnnnnnnnnnnnnnnnnnnnnnnnnnnnnnnnnnnnnnnnnnnnnnnnnnnnnnnnnnnnnnnnnnnnnnnnnnnnnnnnnnnnnnnnnnnnnnnnnnnnnnnnnnnnnnnnnnnnnnnnnnnnnnnnnnnnnnnnnnnnnnnnnnnnnnnnnnnnnnnnnnnnnnnnnnnnnnnnnnnnnnnnnnnnnnnnnnnnnnnnnnnnnnnnnnnnnnnnnnnnnnnnnnnnnnnnnnnnnnnnnnnnnnnnnnnnnnnnnnnnnnnnnnnnnnnnnnnnnnnnnnnnnnnnnnnnnnnnnnnnnnnnnnnnnnnnnnnnnnnnnnnnnnnnnnnnnnnnnnnnnnnnnnnnnnnnnnnnnnnnnnnnnnnnnnnnnnnnnnnnnnnnnnnnnnnnnnnnnnnnnnnnnnnnnnnnnnnnnnnnnnnnnnnnnnnnnnnnnnnnnnnnnnnnnnnnnnnnnnnnnnnnnnnnnnnnnnnnnnnnnnnnnnnnnnnnnnnnnnnnnnnnnnnnnnnnnnnnnnnnnnnnnnnnnnnnnnnnnnnnnnnnnnnnnnnnnnnnnnnnnnnnnnnnnnnnnnnnnnnnnnnnnnnnnnnnnnnnnnnnnnnnnnnnnnnnnnnnnnnnnnnnnnnnnnnnnnnnnnnnnnnnnnnnnnnnnnnnnnnnnnnnnnnnnnnnnnnnnnnnnnnnnnnnnnnnnnnnnnnnnnnnnnnnnnnnnnnnnnnnnnnnnnnnnnnnnnnnnnnnnnnnnnnnnnnnnnnnnnnnnnnnnnnnnnnnnnnnnnnnnnnnnnnnnnnnnnnnnnnnnnnnnnnnnnnnnnnnnnnnnnnnnnnnnnnnnnnnnnnnnnnnnnnnnnnnnnnnnnnnnnnnnnnnnnnnnnnnnnnnnnnnnnnnnnnnnnnnnnnnnnnnnnnnnnnnnnnnnnnnnnnnnnnnnnnnnnnnnnnnnnnnnnnnnnnnnnnnnnnnnnnnnnnnnnnnnnnnnnnnnnnnnnnnnnnnnnnnnnnnnnnnnnnnnnnnnnnnnnnnnnnnnnnnnnnnnnnnnnnnnnnnnnnnnnnnnnnnnnnnnnnnnnnnnnnnnnnnnnnnnnnnnnnnnnnnnnnnnnnnnnnnnnnnnnnnnnnnnnnnnnnnnnnnnnnnnnnnnnnnnnnnnnnnnnnnnnnnnnnnnnnnnnnnnnnnnnnnnnnnnnnnnnnnnnnnnnnnnnnnnnnnnnnnnnnnnnnnnnnnnnnnnnnnnnnnnnnnnnnnnnnnnnnnnnnnnnnnnnnnnnnnnnnnnnnnnnnnnnnnnnnnnnnnnnnnnnnnnnnnnnnnnnnnnnnnnnnnnnnnnnnnnnnnnnnnnnnnnnnnnnnnnnnnnnnnnnnnnnnnnnnnnnnnnnnnnnnnnnnnnnnnnnnnnnnnnnnnnnnnnnnnnnnnnnnnnnnnnnnnnnnnnnnnnnnnnnnnnnnnnnnnnnnnnnnnnnnnnnnnnnnnnnnnnnnnnnnnnnnnnnnnnnnnnnnnnnnnnnnnnnnnnnnnnnnnnnnnnnnnnnnnnnnnnnnnnnnnnnnnnnnnnnnnnnnnnnnnnnnnnnnnnnnnnnnnnnnnnnnnnnnnnnnnnnnnnnnnnnnnnnnnnnnnnnnnnnnnnnnnnnnnnnnnnnnnnnnnnnnnnnnnnnnnnnnnnnnnnnnnnnnnnnnnnnnnnnnnnnnnnnnnnnnnnnnnnnnnnnnnnnnnnnnnnnnnnnnnnnnnnnnnnnnnnnnnnnnnnnnnnnnnnnnnnnnnnnnnnnnnnnnnnnnnnnnnnnnnnnnnnnnnnnnnnnnnnnnnnnnnnnnnnnnnnnnnnnnnnnnnnnnnnnnnnnnnnnnnnnnnnnnnnnnnnnnnnnnnnnnnnnnnnnnnnnnnnnnnnnnnnnnnnnnnnnnnnnnnnnnnnnnnnnnnnnnnnnnnnnnnnnnnnnnnnnnnnnnnnnnnnnnnnnnnnnnnnnnnnnnnnnnnnnnnnnnnnnnnnnnnnnnnnnnnnnnnnnnnnnnnnnnnnnnnnnnnnnnnnnnnnnnnnnnnnnnnnnnnnnnnnnnnnnnnnnnnnnnnnnnnnnnnnnnnnnnnnnnnnnnnnnnnnnnnnnnnnnnnnnnnnnnnnnnnnnnnnnnnnnnnnnnnnnnnnnnnnnnnnnnnnnnnnnnnnnnnnnnnnnnnnnnnnnnnnnnnnnnnnnnnnnnnnnnnnnnnnnnnnnnnnnnnnnnnnnnnnnnnnnnnnnnnnnnnnnnnnnnnnnnnnnnnnnnnnnnnnnnnnnnnnnnnnnnnnnnnnnnnnnnnnnnnnnnnnnnnnnnnnnnnnnnnnnnnnnnnnnnnnnnnnnnnnnnnnnnnnnnnnnnnnnnnnnnnnnnnnnnnnnnnnnnnnnnnnnnnnnnnnnnnnnnnnnnnnnnnnnnnnnnnnnnnnnnnnnnnnnnnnnnnnnnnnnnnnnnnnnnnnnnnnnnnnnnnnnnnnnnnnnnnnnnnnnnnnnnnnnnnnnnnnnnnnnnnnnnnnnnnnnnnnnnnnnnnnnnnnnnnnnnnnnnnnnnnnnnnnnnnnnnnnnnnnnnnnnnnnnnnnnnnnnnnnnnnnnnnnnnnnnnnnnnnnnnnnnnnnnnnnnnnnnnnnnnnnnnnnnnnnnnnnnnnnnnnnnnnnnnnnnnnnnnnnnnnnnnnnnnnnnnnnnnnnnnnnnnnnnnnnnnnnnnnnnnnnnnnnnnnnnnnnnnnnnnnnnnnnnnnnnnnnnnnnnnnnnnnnnnnnnnnnnnnnnnnnnnnnnnnnnnnnnnnnnnnnnnnnnnnnnnnnnnnnnnnnnnnnnnnnnnnnnnnnnnnnnnnnnnnnnnnnnnnnnnnnnnnnnnnnnnnnnnnnnnnnnnnnnnnnnnnnnnnnnnnnnnnnnnnnnnnnnnnnnnnnnnnnnnnnnnnnnnnnnnnnnnnnnnnnnnnnnnnnnnnnnnnnnnnnnnnnnnnnnnnnnnnnnnnnnnnnnnnnnnnnnnnnnnnnnnnnnnnnnnnnnnnnnnnnnnnnnnnnnnnnnnnnnnnnnnnnnnnnnnnnnnnnnnnnnnnnnnnnnnnnnnnnnnnnnnnnnnnnnnnnnnnnnnnnnnnnnnnnnnnnnnnnnnnnnnnnnnnnnnnnnnnnnnnnnnnnnnnnnnnnnnnnnnnnnnnnnnnnnnnnnnnnnnnnnnnnnnnnnnnnnnnnnnnnnnnnnnnnnnnnnnnnnnnnnnnnnnnnnnnnnnnnnnnnnnnnnnnnnnnnnnnnnnnnnnnnnnnnnnnnnnnnnnnnnnnnnnnnnnnnnnnnnnnnnnnnnnnnnnnnnnnnnnnnnnnnnnnnnnnnnnnnnnnnnnnnnnnnnnnnnnnnnnnnnnnnnnnnnnnnnnnnnnnnnnnnnnnnnnnnnnnnnnnnnnnnnnnnnnnnnnnnnnnnnnnnnnnnnnnnnnnnnnnnnnnnnnnnnnnnnnnnnnnnnnnnnnnnnnnnnnnnnnnnnnnnnnnnnnnnnnnnnnnnnnnnnnnnnnnnnnnnnnnnnnnnnnnnnnnnnnnnnnnnnnnnnnnnnnnnnnnnnnnnnnnnnnnnnnnnnnnnnnnnnnnnnnnnnnnnnnnnnnnnnnnnnnnnnnnnnnnnnnnnnnnnnnnnnnnnnnnnnnnnnnnnnnnnnnnnnnnnnnnnnnnnnnnnnnnnnnnnnnnnnnnnnnnnnnnnnnnnnnnnnnnnnnnnnnnnnnnnnnnnnnnnnnnnnnnnnnnnnnnnnnnnnnnnnnnnnnnnnnnnnnnnnnnnnnnnnnnnnnnnnnnnnnnnnnnnnnnnnnnnnnnnnnnnnnnnnnnnnnnnnnnnnnnnnnnnnnnnnnnnnnnnnnnnnnnnnnnnnnnnnnnnnnnnnnnnnnnnnnnnnnnnnnnnnnnnnnnnnnnnnnnnnnnnnnnnnnnnnnnnnnnnnnnnnnnnnnnnnnnnnnnnnnnnnnnnnnnnnnnnnnnnnnnnnnnnnnnnnnnnnnnnnnnnnnnnnnnnnnnnnnnnnnnnnnnnnnnnnnnnnnnnnnnnnnnnnnnnnnnnnnnnnnnnnnnnnnnnnnnnnnnnnnnnnnnnnnnnnnnnnnnnnnnnnnnnnnnnnnnnnnnnnnnnnnnnnnnnnnnnnnnnnnnnnnnnnnnnnnnnnnnnnnnnnnnnnnnnnnnnnnnnnnnnnnnnnnnnnnnnnnnnnnnnnnnnnnnnnnnnnnnnnnnnnnnnnnnnnnnnnnnnnnnnnnnnnnnnnnnnnnnnnnnnnnnnnnnnnnnnnnnnnnnnnnnnnnnnnnnnnnnnnnnnnnnnnnnnnnnnnnnnnnnnnnnnnnnnnnnnnnnnnnnnnnnnnnnnnnnnnnnnnnnnnnnnnnnnnnnnnnnnnnnnnnnnnnnnnnnnnnnnnnnnnnnnnnnnnnnnnnnnnnnnnnnnnnnnnnnnnnnnnnnnnnnnnnnnnnnnnnnnnnnnnnnnnnnnnnnnnnnnnnnnnnnnnnnnnnnnnnnnnnnnnnnnnnnnnnnnnnnnnnnnnnnnnnnnnnnnnnnnnnnnnnnnnnnnnnnnnnnnnnnnnnnnnnnnnnnnnnnnnnnnnnnnnnnnnnnnnnnnnnnnnnnnnnnnnnnnnnnnnnnnnnnnnnnnnnnnnnnnnnnnnnnnnnnnnnnnnnnnnnnnnnnnnnnnnnnnnnnnnnnnnnnnnnnnnnnnnnnnnnnnnnnnnnnnnnnnnnnnnnnnnnnnnnnnnnnnnnnnnnnnnnnnnnnnnnnnnnnnnnnnnnnnnnnnnnnnnnnnnnnnnnnnnnnnnnnnnnnnnnnnnnnnnnnnnnnnnnnnnnnnnnnnnnnnnnnnnnnnnnnnnnnnnnnnnnnnnnnnnnnnnnnnnnnnnnnnnnnnnnnnnnnnnnnnnnnnnnnnnnnnnnnnnnnnnnnnnnnnnnnnnnnnnnnnnnnnnnnnnnnnnnnnnnnnnnnnnnnnnnnnnnnnnnnnnnnnnnnnnnnnnnnnnnnnnnnnnnnnnnnnnnnnnnnnnnnnnnnnnnnnnnnnnnnnnnnnnnnnnnnnnnnnnnnnnnnnnnnnnnnnnnnnnnnnnnnnnnnnnnnnnnnnnnnnnnnnnnnnnnnnnnnnnnnnnnnnnnnnnnnnnnnnnnnnnnnnnnnnnnnnnnnnnnnnnnnnnnnnnnnnnnnnnnnnnnnnnnnnnnnnnnnnnnnnnnnnnnnnnnnnnnnnnnnnnnnnnnnnnnnnnnnnnnnnnnnnnnnnnnnnnnnnnnnnnnnnnnnnnnnnnnnnnnnnnnnnnnnnnnnnnnnnnnnnnnnnnnnnnnnnnnnnnnnnnnnnnnnnnnnnnnnnnnnnnnnnnnnnnnnnnnnnnnnnnnnnnnnnnnnnnnnnnnnnnnnnnnnnnnnnnnnnnnnnnnnnnnnnnnnnnnnnnnnnnnnnnnnnnnnnnnnnnnnnnnnnnnnnnnnnnnnnnnnnnnnnnnnnnnnnnnnnnnnnnnnnnnnnnnnnnnnnnnnnnnnnnnnnnnnnnnnnnnnnnnnnnnnnnnnnnnnnnnnnnnnnnnnnnnnnnnnnnnnnnnnnnnnnnnnnnnnnnnnnnnnnnnnnnnnnnnnnnnnnnnnnnnnnnnnnnnnnnnnnnnnnnnnnnnnnnnnnnnnnnnnnnnnnnnnnnnnnnnnnnnnnnnnnnnnnnnnnnnnnnnnnnnnnnnnnnnnnnnnnnnnnnnnnnnnnnnnnnnnnnnnnnnnnnnnnnnnnnnnnnnnnnnnnnnnnnnnnnnnnnnnnnnnnnnnnnnnnnnnnnnnnnnnnnnnnnnnnnnnnnnnnnnnnnnnnnnnnnnnnnnnnnnnnnnnnnnnnnnnnnnnnnnnnnnnnnnnnnnnnnnnnnnnnnnnnnnnnnnnnnnnnnnnnnnnnnnnnnnnnnnnnnnnnnnnnnnnnnnnnnnnnnnnnnnnnnnnnnnnnnnnnnnnnnnnnnnnnnnnnnnnnnnnnnnnnnnnnnnnnnnnnnnnnnnnnnnnnnnnnnnnnnnnnnnnnnnnnnnnnnnnnnnnnnnnnnnnnnnnnnnnnnnnnnnnnnnnnnnnnnnnnnnnnnnnnnnnnnnnnnnnnnnnnnnnnnnnnnnnnnnnnnnnnnnnnnnnnnnnnnnnnnnnnnnnnnnnnnnnnnnnnnnnnnnnnnnnnnnnnnnnnnnnnnnnnnnnnnnnnnnnnnnnnnnnnnnnnnnnnnnnnnnnnnnnnnnnnnnnnnnnnnnnnnnnnnnnnnnnnnnnnnnnnnnnnnnnnnnnnnnnnnnnnnnnnnnnnnnnnnnnnnnnnnnnnnnnnnnnnnnnnnnnnnnnnnnnnnnnnnnnnnnnnnnnnnnnnnnnnnnnnnnnnnnnnnnnnnnnnnnnnnnnnnnnnnnnnnnnnnnnnnnnnnnnnnnnnnnnnnnnnnnnnnnnnnnnnnnnnnnnnnnnnnnnnnnnnnnnnnnnnnnnnnnnnnnnnnnnnnnnnnnnnnnnnnnnnnnnnnnnnnnnnnnnnnnnnnnnnnnnnnnnnnnnnnnnnnnnnnnnnnnnnnnnnnnnnnnnnnnnnnnnnnnnnnnnnnnnnnnnnnnnnnnnnnnnnnnnnnnnnnnnnnnnnnnnnnnnnnnnnnnnnnnnnnnnnnnnnnnnnnnnnnnnnnnnnnnnnnnnnnnnnnnnnnnnnnnnnnnnnnnnnnnnnnnnnnnnnnnnnnnnnnnnnnnnnnnnnnnnnnnnnnnnnnnnnnnnnnnnnnnnnnnnnnnnnnnnnnnnnnnnnnnnnnnnnnnnnnnnnnnnnnnnnnnnnnnnnnnnnnnnnnnnnnnnnnnnnnnnnnnnnnnnnnnnnnnnnnnnnnnnnnnnnnnnnnnnnnnnnnnnnnnnnnnnnnnnnnnnnnnnnnnnnnnnnnnnnnnnnnnnnnnnnnnnnnnnnnnnnnnnnnnnnnnnnnnnnnnnnnnnnnnnnnnnnnnnnnnnnnnnnnnnnnnnnnnnnnnnnnnnnnnnnnnnnnnnnnnnnnnnnnnnnnnnnnnnnnnnnnnnnnnnnnnnnnnnnnnnnnnnnnnnnnnnnnnnnnnnnnnnnnnnnnnnnnnnnnnnnnnnnnnnnnnnnnnnnnnnnnnnnnnnnnnnnnnnnnnnnnnnnnnnnnnnnnnnnnnnnnnnnnnnnnnnnnnnnnnnnnnnnnnnnnnnnnnnnnnnnnnnnnnnnnnnnnnnnnnnnnnnnnnnnnnnnnnnnnnnnnnnnnnnnnnnnnnnnnnnnnnnnnnnnnnnnnnnnnnnnnnnnnnnnnnnnnnnnnnnnnnnnnnnnnnnnnnnnnnnnnnnnnnnnnnnnnnnnnnnnnnnnnnnnnnnnnnnnnnnnnnnnnnnnnnnnnnnnnnnnnnnnnnnnnnnnnnnnnnnnnnnnnnnnnnnnnnnnnnnnnnnnnnnnnnnnnnnnnnnnnnnnnnnnnnnnnnnnnnnnnnnnnnnnnnnnnnnnnnnnnnnnnnnnnnnnnnnnnnnnnnnnnnnnnnnnnnnnnnnnnnnnnnnnnnnnnnnnnnnnnnnnnnnnnnnnnnnnnnnnnnnnnnnnnnnnnnnnnnnnnnnnnnnnnnnnnnnnnnnnnnnnnnnnnnnnnnnnnnnnnnnnnnnnnnnnnnnnnnnnnnnnnnnnnnnnnnnnnnnnnnnnnnnnnnnnnnnnnnnnnnnnnnnnnnnnnnnnnnnnnnnnnnnnnnnnnnnnnnnnnnnnnnnnnnnnnnnnnnnnnnnnnnnnnnnnnnnnnnnnnnnnnnnnnnnnnnnnnnnnnnnnnnnnnnnnnnnnnnnnnnnnnnnnnnnnnnnnnnnnnnnnnnnnnnnnnnnnnnnnnnnnnnnnnnnnnnnnnnnnnnnnnnnnnnnnnnnnnnnnnnnnnnnnnnnnnnnnnnnnnnnnnnnnnnnnnnnnnnnnnnnnnnnnnnnnnnnnnnnnnnnnnnnnnnnnnnnnnnnnnnnnnnnnnnnnnnnnnnnnnnnnnnnnnnnnnnnnnnnnnnnnnnnnnnnnnnnnnnnnnnnnnnnnnnnnnnnnnnnnnnnnnnnnnnnnnnnnnnnnnnnnnnnnnnnnnnnnnnnnnnnnnnnnnnnnnnnnnnnnnnnnnnnnnnnnnnnnnnnnnnnnnnnnnnnnnnnnnnnnnnnnnnnnnnnnnnnnnnnnnnnnnnnnnnnnnnnnnnnnnnnnnnnnnnnnnnnnnnnnnnnnnnnnnnnnnnnnnnnnnnnnnnnnnnnnnnnnnnnnnnnnnnnnnnnnnnnnnnnnnnnnnnnnnnnnnnnnnnnnnnnnnnnnnnnnnnnnnnnnnnnnnnnnnnnnnnnnnnnnnnnnnnnnnnnnnnnnnnnnnnnnnnnnnnnnnnnnnnnnnnnnnnnnnnnnnnnnnnnnnnnnnnnnnnnnnnnnnnnnnnnnnnnnnnnnnnnnnnnnnnnnnnnnnnnnnnnnnnnnnnnnnnnnnnnnnnnnnnnnnnnnnnnnnnnnnnnnnnnnnnnnnnnnnnnnnnnnnnnnnnnnnnnnnnnnnnnnnnnnnnnnnnnnnnnnnnnnnnnnnnnnnnnnnnnnnnnnnnnnnnnnnnnnnnnnnnnnnnnnnnnnnnnnnnnnnnnnnnnnnnnnnnnnnnnnnnnnnnnnnnnnnnnnnnnnnnnnnnnnnnnnnnnnnnnnnnnnnnnnnnnnnnnnnnnnnnnnnnnnnnnnnnnnnnnnnnnnnnnnnnnnnnnnnnnnnnnnnnnnnnnnnnnnnnnnnnnnnnnnnnnnnnnnnnnnnnnnnnnnnnnnnnnnnnnnnnnnnnnnnnnnnnnnnnnnnnnnnnnnnnnnnnnnnnnnnnnnnnnnnnnnnnnnnnnnnnnnnnnnnnnnnnnnnnnnnnnnnnnnnnnnnnnnnnnnnnnnnnnnnnnnnnnnnnnnnnnnnnnnnnnnnnnnnnnnnnnnnnnnnnnnnnnnnnnnnnnnnnnnnnnnnnnnnnnnnnnnnnnnnnnnnnnnnnnnnnnnnnnnnnnnnnnnnnnnnnnnnnnnnnnnnnnnnnnnnnnnnnnnnnnnnnnnnnnnnnnnnnnnnnnnnnnnnnnnnnnnnnnnnnnnnnnnnnnnnnnnnnnnnnnnnnnnnnnnnnnnnnnnnnnnnnnnnnnnnnnnnnnnnnnnnnnnnnnnnnnnnnnnnnnnnnnnnnnnnnnnnnnnnnnnnnnnnnnnnnnnnnnnnnnnnnnnnnnnnnnnnnnnnnnnnnnnnnnnnnnnnnnnnnnnnnnnnnnnnnnnnnnnnnnnnnnnnnnnnnnnnnnnnnnnnnnnnnnnnnnnnnnnnnnnnnnnnnnnnnnnnnnnnnnnnnnnnnnnnnnnnnnnnnnnnnnnnnnnnnnnnnnnnnnnnnnnnnnnnnnnnnnnnnnnnnnnnnnnnnnnnnnnnnnnnnnnnnnnnnnnnnnnnnnnnnnnnnnnnnnnnnnnnnnnnnnnnnnnnnnnnnnnnnnnnnnnnnnnnnnnnnnnnnnnnnnnnnnnnnnnnnnnnnnnnnnnnnnnnnnnnnnnnnnnnnnnnnnnnnnnnnnnnnnnnnnnnnnnnnnnnnnnnnnnnnnnnnnnnnnnnnnnnnnnnnnnnnnnnnnnnnnnnnnnnnnnnnnnnnnnnnnnnnnnnnnnnnnnnnnnnnnnnnnnnnnnnnnnnnnnnnnnnnnnnnnnnnnnnnnnnnnnnnnnnnnnnnnnnnnnnnnnnnnnnnnnnnnnnnnnnnnnnnnnnnnnnnnnnnnnnnnnnnnnnnnnnnnnnnnnnnnnnnnnnnnnnnnnnnnnnnnnnnnnnnnnnnnnnnnnnnnnnnnnnnnnnnnnnnnnnnnnnnnnnnnnnnnnnnnnnnnnnnnnnnnnnnnnnnnnnnnnnnnnnnnnnnnnnnnnnnnnnnnnnnnnnnnnnnnnnnnnnnnnnnnnnnnnnnnnnnnnnnnnnnnnnnnnnnnnnnnnnnnnnnnnnnnnnnnnnnnnnnnnnnnnnnnnnnnnnnnnnnnnnnnnnnnnnnnnnnnnnnnnnnnnnnnnnnnnnnnnnnnnnnnnnnnnnnnnnnnnnnnnnnnnnnnnnnnnnnnnnnnnnnnnnnnnnnnnnnnnnnnnnnnnnnnnnnnnnnnnnnnnnnnnnnnnnnnnnnnnnnnnnnnnnnnnnnnnnnnnnnnnnnnnnnnnnnnnnnnnnnnnnnnnnnnnnnnnnnnnnnnnnnnnnnnnnnnnnnnnnnnnnnnnnnnnnnnnnnnnnnnnnnnnnnnnnnnnnnnnnnnnnnnnnnnnnnnnnnnnnnnnnnnnnnnnnnnnnnnnnnnnnnnnnnnnnnnnnnnnnnnnnnnnnnnnnnnnnnnnnnnnnnnnnnnnnnnnnnnnnnnnnnnnnnnnnnnnnnnnnnnnnnnnnnnnnnnnnnnnnnnnnnnnnnnnnnnnnnnnnnnnnnnnnnnnnnnnnnnnnnnnnnnnnnnnnnnnnnnnnnnnnnnnnnnnnnnnnnnnnnnnnnnnnnnnnnnnnnnnnnnnnnnnnnnnnnnnnnnnnnnnnnnnnnnnnnnnnnnnnnnnnnnnnnnnnnnnnnnnnnnnnnnnnnnnnnnnnnnnnnnnnnnnnnnnnnnnnnnnnnnnnnnnnnnnnnnnnnnnnnnnnnnnnnnnnnnnnnnnnnnnnnnnnnnnnnnnnnnnnnnnnnnnnnnnnnnnnnnnnnnnnnnnnnnnnnnnnnnnnnnnnnnnnnnnnnnnnnnnnnnnnnnnnnnnnnnnnnnnnnnnnnnnnnnnnnnnnnnnnnnnnnnnnnnnnnnnnnnnnnnnnnnnnnnnnnnnnnnnnnnnnnnnnnnnnnnnnnnnnnnnnnnnnnnnnnnnnnnnnnnnnnnnnnnnnnnnnnnnnnnnnnnnnnnnnnnnnnnnnnnnnnnnnnnnnnnnnnnnnnnnnnnnnnnnnnnnnnnnnnnnnnnnnnnnnnnnnnnnnnnnnnnnnnnnnnnnnnnnnnnnnnnnnnnnnnnnnnnnnnnnnnnnnnnnnnnnnnnnnnnnnnnnnnnnnnnnnnnnnnnnnnnnnnnnnnnnnnnnnnnnnnnnnnnnnnnnnnnnnnnnnnnnnnnnnnnnnnnnnnnnnnnnnnnnnnnnnnnnnnnnnnnnnnnnnnnnnnnnnnnnnnnnnnnnnnnnnnnnnnnnnnnnnnnnnnnnnnnnnnnnnnnnnnnnnnnnnnnnnnnnnnnnnnnnnnnnnnnnnnnnnnnnnnnnnnnnnnnnnnnnnnnnnnnnnnnnnnnnnnnnnnnnnnnnnnnnnnnnnnnnnnnnnnnnnnnnnnnnnnnnnnnnnnnnnnnnnnnnnnnnnnnnnnnnnnnnnnnnnnnnnnnnnnnnnnnnnnnnnnnnnnnnnnnnnnnnnnnnnnnnnnnnnnnnnnnnnnnnnnnnnnnnnnnnnnnnnnnnnnnnnnnnnnnnnnnnnnnnnnnnnnnnnnnnnnnnnnnnnnnnnnnnnnnnnnnnnnnnnnnnnnnnnnnnnnnnnnnnnnnnnnnnnnnnnnnnnnnnnnnnnnnnnnnnnnnnnnnnnnnnnnnnnnnnnnnnnnnnnnnnnnnnnnnnnnnnnnnnnnnnnnnnnnnnnnnnnnnnnnnnnnnnnnnnnnnnnnnnnnnnnnnnnnnnnnnnnnnnnnnnnnnnnnnnnnnnnnnnnnnnnnnnnnnnnnnnnnnnnnnnnnnnnnnnnnnnnnnnnnnnnnnnnnnnnnnnnnnnnnnnnnnnnnnnnnnnnnnnnnnnnnnnnnnnnnnnnnnnnnnnnnnnnnnnnnnnnnnnnnnnnnnnnnnnnnnnnnnnnnnnnnnnnnnnnnnnnnnnnnnnnnnnnnnnnnnnnnnnnnnnnnnnnnnnnnnnnnnnnnnnnnnnnnnnnnnnnnnnnnnnnnnnnnnnnnnnnnnnnnnnnnnnnnnnnnnnnnnnnnnnnnnnnnnnnnnnnnnnnnnnnnnnnnnnnnnnnnnnnnnnnnnnnnnnnnnnnnnnnnnnnnnnnnnnnnnnnnnnnnnnnnnnnnnnnnnnnnnnnnnnnnnnnnnnnnnnnnnnnnnnnnnnnnnnnnnnnnnnnnnnnnnnnnnnnnnnnnnnnnnnnnnnnnnnnnnnnnnnnnnnnnnnnnnnnnnnnnnnnnnnnnnnnnnnnnnnnnnnnnnnnnnnnnnnnnnnnnnnnnnnnnnnnnnnnnnnnnnnnnnnnnnnnnnnnnnnnnnnnnnnnnnnnnnnnnnnnnnnnnnnnnnnnnnnnnnnnnnnnnnnnnnnnnnnnnnnnnnnnnnnnnnnnnnnnnnnnnnnnnnnnnnnnnnnnnnnnnnnnnnnnnnnnnnnnnnnnnnnnnnnnnnnnnnnnnnnnnnnnnnnnnnnnnnnnnnnnnnnnnnnnnnnnnnnnnnnnnnnnnnnnnnnnnnnnnnnnnnnnnnnnnnnnnnnnnnnnnnnnnnnnnnnnnnnnnnnnnnnnnnnnnnnnnnnnnnnnnnnnnnnnnnnnnnnnnnnnnnnnnnnnnnnnnnnnnnnnnnnnnnnnnnnnnnnnnnnnnnnnnnnnnnnnnnnnnnnnnnnnnnnnnnnnnnnnnnnnnnnnnnnnnnnnnnnnnnnnnnnnnnnnnnnnnnnnnnnnnnnnnnnnnnnnnnnnnnnnnnnnnnnnnnnnnnnnnnnnnnnnnnnnnnnnnnnnnnnnnnnnnnnnnnnnnnnnnnnnnnnnnnnnnnnnnnnnnnnnnnnnnnnnnnnnnnnnnnnnnnnnnnnnnnnnnnnnnnnnnnnnnnnnnnnnnnnnnnnnnnnnnnnnnnnnnnnnnnnnnnnnnnnnnnnnnnnnnnnnnnnnnnnnnnnnnnnnnnnnnnnnnnnnnnnnnnnnnnnnnnnnnnnnnnnnnnnnnnnnnnnnnnnnnnnnnnnnnnnnnnnnnnnnnnnnnnnnnnnnnnnnnnnnnnnnnnnnnnnnnnnnnnnnnnnnnnnnnnnnnnnnnnnnnnnnnnnnnnnnnnnnnnnnnnnnnnnnnnnnnnnnnnnnnnnnnnnnnnnnnnnnnnnnnnnnnnnnnnnnnnnnnnnnnnnnnnnnnnnnnnnnnnnnnnnnnnnnnnnnnnnnnnnnnnnnnnnnnnnnnnnnnnnnnnnnnnnnnnnnnnnnnnnnnnnnnnnnnnnnnnnnnnnnnnnnnnnnnnnnnnnnnnnnnnnnnnnnnnnnnnnnnnnnnnnnnnnnnnnnnnnnnnnnnnnnnnnnnnnnnnnnnnnnnnnnnnnnnnnnnnnnnnnnnnnnnnnnnnnnnnnnnnnnnnnnnnnnnnnnnnnnnnnnnnnnnnnnnnnnnnnnnnnnnnnnnnnnnnnnnnnnnnnnnnnnnnnnnnnnnnnnnnnnnnnnnnnnnnnnnnnnnnnnnnnnnnnnnnnnnnnnnnnnnnnnnnnnnnnnnnnnnnnnnnnnnnnnnnnnnnnnnnnnnnnnnnnnnnnnnnnnnnnnnnnnnnnnnnnnnnnnnnnnnnnnnnnnnnnnnnnnnnnnnnnnnnnnnnnnnnnnnnnnnnnnnnnnnnnnnnnnnnnnnnnnnnnnnnnnnnnnnnnnnnnnnnnnnnnnnnnnnnnnnnnnnnnnnnnnnnnnnnnnnnnnnnnnnnnnnnnnnnnnnnnnnnnnnnnnnnnnnnnnnnnnnnnnnnnnnnnnnnnnnnnnnnnnnnnnnnnnnnnnnnnnnnnnnnnnnnnnnnnnnnnnnnnnnnnnnnnnnnnnnnnnnnnnnnnnnnnnnnnnnnnnnnnnnnnnnnnnnnnnnnnnnnnnnnnnnnnnnnnnnnnnnnnnnnnnnnnnnnnnnnnnnnnnnnnnnnnnnnnnnnnnnnnnnnnnnnnnnnnnnnnnnnnnnnnnnnnnnnnnnnnnnnnnnnnnnnnnnnnnnnnnnnnnnnnnnnnnnnnnnnnnnnnnnnnnnnnnnnnnnnnnnnnnnnnnnnnnnnnnnnnnnnnnnnnnnnnnnnnnnnnnnnnnnnnnnnnnnnnnnnnnnnnnnnnnnnnnnnnnnnnnnnnnnnnnnnnnnnnnnnnnnnnnnnnnnnnnnnnnnnnnnnnnnnnnnnnnnnnnnnnnnnnnnnnnnnnnnnnnnnnnnnnnnnnnnnnnnnnnnnnnnnnnnnnnnnnnnnnnnnnnnnnnnnnnnnnnnnnnnnnnnnnnnnnnnnnnnnnnnnnnnnnnnnnnnnnnnnnnnnnnnnnnnnnnnnnnnnnnnnnnnnnnnnnnnnnnnnnnnnnnnnnnnnnnnnnnnnnnnnnnnnnnnnnnnnnnnnnnnnnnnnnnnnnnnnnnnnnnnnnnnnnnnnnnnnnnnnnnnnnnnnnnnnnnnnnnnnnnnnnnnnnnnnnnnnnnnnnnnnnnnnnnnnnnnnnnnnnnnnnnnnnnnnnnnnnnnnnnnnnnnnnnnnnnnnnnnnnnnnnnnnnnnnnnnnnnnnnnnnnnnnnnnnnnnnnnnnnnnnnnnnnnnnnnnnnnnnnnnnnnnnnnnnnnnnnnnnnnnnnnnnnnnnnnnnnnnnnnnnnnnnnnnnnnnnnnnnnnnnnnnnnnnnnnnnnnnnnnnnnnnnnnnnnnnnnnnnnnnnnnnnnnnnnnnnnnnnnnnnnnnnnnnnnnnnnnnnnnnnnnnnnnnnnnnnnnnnnnnnnnnnnnnnnnnnnnnnnnnnnnnnnnnnnnnnnnnnnnnnnnnnnnnnnnnnnnnnnnnnnnnnnnnnnnnnnnnnnnnnnnnnnnnnnnnnnnnnnnnnnnnnnnnnnnnnnnnnnnnnnnnnnnnnnnnnnnnnnnnnnnnnnnnnnnnnnnnnnnnnnnnnnnnnnnnnnnnnnnnnnnnnnnnnnnnnnnnnnnnnnnnnnnnnnnnnnnnnnnnnnnnnnnnnnnnnnnnnnnnnnnnnnnnnnnnnnnnnnnnnnnnnnnnnnnnnnnnnnnnnnnnnnnnnnnnnnnnnnnnnnnnnnnnnnnnnnnnnnnnnnnnnnnnnnnnnnnnnnnnnnnnnnnnnnnnnnnnnnnnnnnnnnnnnnnnnnnnnnnnnnnnnnnnnnnnnnnnnnnnnnnnnnnnnnnnnnnnnnnnnnnnnnnnnnnnnnnnnnnnnnnnnnnnnnnnnnnnnnnnnnnnnnnnnnnnnnnnnnnnnnnnnnnnnnnnnnnnnnnnnnnnnnnnnnnnnnnnnnnnnnnnnnnnnnnnnnnnnnnnnnnnnnnnnnnnnnnnnnnnnnnnnnnnnnnnnnnnnnnnnnnnnnnnnnnnnnnnnnnnnnnnnnnnnnnnnnnnnnnnnnnnnnnnnnnnnnnnnnnnnnnnnnnnnnnnnnnnnnnnnnnnnnnnnnnnnnnnnnnnnnnnnnnnnnnnnnnnnnnnnnnnnnnnnnnnnnnnnnnnnnnnnnnnnnnnnnnnnnnnnnnnnnnnnnnnnnnnnnnnnnnnnnnnnnnnnnnnnnnnnnnnnnnnnnnnnnnnnnnnnnnnnnnnnnnnnnnnnnnnnnnnnnnnnnnnnnnnnnnnnnnnnnnnnnnnnnnnnnnnnnnnnnnnnnnnnnnnnnnnnnnnnnnnnnnnnnnnnnnnnnnnnnnnnnnnnnnnnnnnnnnnnnnnnnnnnnnnnnnnnnnnnnnnnnnnnnnnnnnnnnnnnnnnnnnnnnnnnnnnnnnnnnnnnnnnnnnnnnnnnnnnnnnnnnnnnnnnnnnnnnnnnnnnnnnnnnnnnnnnnnnnnnnnnnnnnnnnnnnnnnnnnnnnnnnnnnnnnnnnnnnnnnnnnnnnnnnnnnnnnnnnnnnnnnnnnnnnnnnnnnnnnnnnnnnnnnnnnnnnnnnnnnnnnnnnnnnnnnnnnnnnnnnnnnnnnnnnnnnnnnnnnnnnnnnnnnnnnnnnnnnnnnnnnnnnnnnnnnnnnnnnnnnnnnnnnnnnnnnnnnnnnnnnnnnnnnnnnnnnnnnnnnnnnnnnnnnnnnnnnnnnnnnnnnnnnnnnnnnnnnnnnnnnnnnnnnnnnnnnnnnnnnnnnnnnnnnnnnnnnnnnnnnnnnnnnnnnnnnnnnnnnnnnnnnnnnnnnnnnnnnnnnnnnnnnnnnnnnnnnnnnnnnnnnnnnnnnnnnnnnnnnnnnnnnnnnnnnnnnnnnnnnnnnnnnnnnnnnnnnnnnnnnnnnnnnnnnnnnnnnnnnnnnnnnnnnnnnnnnnnnnnnnnnnnnnnnnnnnnnnnnnnnnnnnnnnnnnnnnnnnnnnnnnnnnnnnnnnnnnnnnnnnnnnnnnnnnnnnnnnnnnnnnnnnnnnnnnnnnnnnnnnnnnnnnnnnnnnnnnnnnnnnnnnnnnnnnnnnnnnnnnnnnnnnnnnnnnnnnnnnnnnnnnnnnnnnnnnnnnnnnnnnnnnnnnnnnnnnnnnnnnnnnnnnnnnnnnnnnnnnnnnnnnnnnnnnnnnnnnnnnnnnnnnnnnnnnnnnnnnnnnnnnnnnnnnnnnnnnnnnnnnnnnnnnnnnnnnnnnnnnnnnnnnnnnnnnnnnnnnnnnnnnnnnnnnnnnnnnnnnnnnnnnnnnnnnnnnnnnnnnnnnnnnnnnnnnnnnnnnnnnnnnnnnnnnnnnnnnnnnnnnnnnnnnnnnnnnnnnnnnnnnnnnnnnnnnnnnnnnnnnnnnnnnnnnnnnnnnnnnnnnnnnnnnnnnnnnnnnnnnnnnnnnnnnnnnnnnnnnnnnnnnnnnnnnnnnnnnnnnnnnnnnnnnnnnnnnnnnnnnnnnnnnnnnnnnnnnnnnnnnnnnnnnnnnnnnnnnnnnnnnnnnnnnnnnnnnnnnnnnnnnnnnnnnnnnnnnnnnnnnnnnnnnnnnnnnnnnnnnnnnnnnnnnnnnnnnnnnnnnnnnnnnnnnnnnnnnnnnnnnnnnnnnnnnnnnnnnnnnnnnnnnnnnnnnnnnnnnnnnnnnnnnnnnnnnnnnnnnnnnnnnnnnnnnnnnnnnnnnnnnnnnnnnnnnnnnnnnnnnnnnnnnnnnnnnnnnnnnnnnnnnnnnnnnnnnnnnnnnnnnnnnnnnnnnnnnnnnnnnnnnnnnnnnnnnnnnnnnnnnnnnnnnnnnnnnnnnnnnnnnnnnnnnnnnnnnnnnnnnnnnnnnnnnnnnnnnnnnnnnnnnnnnnnnnnnnnnnnnnnnnnnnnnnnnnnnnnnnnnnnnnnnnnnnnnnnnnnnnnnnnnnnnnnnnnnnnnnnnnnnnnnnnnnnnnnnnnnnnnnnnnnnnnnnnnnnnnnnnnnnnnnnnnnnnnnnnnnnnnnnnnnnnnnnnnnnnnnnnnnnnnnnnnnnnnnnnnnnnnnnnnnnnnnnnnnnnnnnnnnnnnnnnnnnnnnnnnnnnnnnnnnnnnnnnnnnnnnnnnnnnnnnnnnnnnnnnnnnnnnnnnnnnnnnnnnnnnnnnnnnnnnnnnnnnnnnnnnnnnnnnnnnnnnnnnnnnnnnnnnnnnnnnnnnnnnnnnnnnnnnnnnnnnnnnnnnnnnnnnnnnnnnnnnnnnnnnnnnnnnnnnnnnnnnnnnnnnnnnnnnnnnnnnnnnnnnnnnnnnnnnnnnnnnnnnnnnnnnnnnnnnnnnnnnnnnnnnnnnnnnnnnnnnnnnnnnnnnnnnnnnnnnnnnnnnnnnnnnnnnnnnnnnnnnnnnnnnnnnnnnnnnnnnnnnnnnnnnnnnnnnnnnnnnnnnnnnnnnnnnnnnnnnnnnnnnnnnnnnnnnnnnnnnnnnnnnnnnnnnnnnnnnnnnnnnnnnnnnnnnnnnnnnnnnnnnnnnnnnnnnnnnnnnnnnnnnnnnnnnnnnnnnnnnnnnnnnnnnnnnnnnnnnnnnnnnnnnnnnnnnnnnnnnnnnnnnnnnnnnnnnnnnnnnnnnnnnnnnnnnnnnnnnnnnnnnnnnnnnnnnnnnnnnnnnnnnnnnnnnnnnnnnnnnnnnnnnnnnnnnnnnnnnnnnnnnnnnnnnnnnnnnnnnnnnnnnnnnnnnnnnnnnnnnnnnnnnnnnnnnnnnnnnnnnnnnnnnnnnnnnnnnnnnnnnnnnnnnnnnnnnnnnnnnnnnnnnnnnnnnnnnnnnnnnnnnnnnnnnnnnnnnnnnnnnnnnnnnnnnnnnnnnnnnnnnnnnnnnnnnnnnnnnnnnnnnnnnnnnnnnnnnnnnnnnnnnnnnnnnnnnnnnnnnnnnnnnnnnnnnnnnnnnnnnnnnnnnnnnnnnnnnnnnnnnnnnnnnnnnnnnnnnnnnnnnnnnnnnnnnnnnnnnnnnnnnnnnnnnnnnnnnnnnnnnnnnnnnnnnnnnnnnnnnnnnnnnnnnnnnnnnnnnnnnnnnnnnnnnnnnnnnnnnnnnnnnnnnnnnnnnnnnnnnnnnnnnnnnnnnnnnnnnnnnnnnnnnnnnnnnnnnnnnnnnnnnnnnnnnnnnnnnnnnnnnnnnnnnnnnnnnnnnnnnnnnnnnnnnnnnnnnnnnnnnnnnnnnnnnnnnnnnnnnnnnnnnnnnnnnnnnnnnnnnnnnnnnnnnnnnnnnnnnnnnnnnnnnnnnnnnnnnnnnnnnnnnnnnnnnnnnnnnnnnnnnnnnnnnnnnnnnnnnnnnnnnnnnnnnnnnnnnnnnnnnnnnnnnnnnnnnnnnnnnnnnnnnnnnnnnnnnnnnnnnnnnnnnnnnnnnnnnnnnnnnnnnnnnnnnnnnnnnnnnnnnnnnnnnnnnnnnnnnnnnnnnnnnnnnnnnnnnnnnnnnnnnnnnnnnnnnnnnnnnnnnnnnnnnnnnnnnnnnnnnnnnnnnnnnnnnnnnnnnnnnnnnnnnnnnnnnnnnnnnnnnnnnnnnnnnnnnnnnnnnnnnnnnnnnnnnnnnnnnnnnnnnnnnnnnnnnnnnnnnnnnnnnnnnnnnnnnnnnnnnnnnnnnnnnnnnnnnnnnnnnnnnnnnnnnnnnnnnnnnnnnnnnnnnnnnnnnnnnnnnnnnnnnnnnnnnnnnnnnnnnnnnnnnnnnnnnnnnnnnnnnnnnnnnnnnnnnnnnnnnnnnnnnnnnnnnnnnnnnnnnnnnnnnnnnnnnnnnnnnnnnnnnnnnnnnnnnnnnnnnnnnnnnnnnnnnnnnnnnnnnnnnnnnnnnnnnnnnnnnnnnnnnnnnnnnnnnnnnnnnnnnnnnnnnnnnnnnnnnnnnnnnnnnnnnnnnnnnnnnnnnnnnnnnnnnnnnnnnnnnnnnnnnnnnnnnnnnnnnnnnnnnnnnnnnnnnnnnnnnnnnnnnnnnnnnnnnnnnnnnnnnnnnnnnnnnnnnnnnnnnnnnnnnnnnnnnnnnnnnnnnnnnnnnnnnnnnnnnnnnnnnnnnnnnnnnnnnnnnnnnnnnnnnnnnnnnnnnnnnnnnnnnnnnnnnnnnnnnnnnnnnnnnnnnnnnnnnnnnnnnnnnnnnnnnnnnnnnnnnnnnnnnnnnnnnnnnnnnnnnnnnnnnnnnnnnnnnnnnnnnnnnnnnnnnnnnnnnnnnnnnnnnnnnnnnnnnnnnnnnnnnnnnnnnnnnnnnnnnnnnnnnnnnnnnnnnnnnnnnnnnnnnnnnnnnnnnnnnnnnnnnnnnnnnnnnnnnnnnnnnnnnnnnnnnnnnnnnnnnnnnnnnnnnnnnnnnnnnnnnnnnnnnnnnnnnnnnnnnnnnnnnnnnnnnnnnnnnnnnnnnnnnnnnnnnnnnnnnnnnnnnnnnnnnnnnnnnnnnnnnnnnnnnnnnnnnnnnnnnnnnnnnnnnnnnnnnnnnnnnnnnnnnnnnnnnnnnnnnnnnnnnnnnnnnnnnnnnnnnnnnnnnnnnnnnnnnnnnnnnnnnnnnnnnnnnnnnnnnnnnnnnnnnnnnnnnnnnnnnnnnnnnnnnnnnnnnnnnnnnnnnnnnnnnnnnnnnnnnnnnnnnnnnnnnnnnnnnnnnnnnnnnnnnnnnnnnnnnnnnnnnnnnnnnnnnnnnnnnnnnnnnnnnnnnnnnnnnnnnnnnnnnnnnnnnnnnnnnnnnnnnnnnnnnnnnnnnnnnnnnnnnnnnnnnnnnnnnnnnnnnnnnnnnnnnnnnnnnnnnnnnnnnnnnnnnnnnnnnnnnnnnnnnnnnnnnnnnnnnnnnnnnnnnnnnnnnnnnnnnnnnnnnnnnnnnnnnnnnnnnnnnnnnnnnnnnnnnnnnnnnnnnnnnnnnnnnnnnnnnnnnnnnnnnnnnnnnnnnnnnnnnnnnnnnnnnnnnnnnnnnnnnnnnnnnnnnnnnnnnnnnnnnnnnnnnnnnnnnnnnnnnnnnnnnnnnnnnnnnnnnnnnnnnnnnnnnnnnnnnnnnnnnnnnnnnnnnnnnnnnnnnnnnnnnnnnnnnnnnnnnnnnnnnnnnnnnnnnnnnnnnnnnnnnnnnnnnnnnnnnnnnnnnnnnnnnnnnnnnnnnnnnnnnnnnnnnnnnnnnnnnnnnnnnnnnnnnnnnnnnnnnnnnnnnnnnnnnnnnnnnnnnnnnnnnnnnnnnnnnnnnnnnnnnnnnnnnnnnnnnnnnnnnnnnnnnnnnnnnnnnnnnnnnnnnnnnnnnnnnnnnnnnnnnnnnnnnnnnnnnnnnnnnnnnnnnnnnnnnnnnnnnnnnnnnnnnnnnnnnnnnnnnnnnnnnnnnnnnnnnnnnnnnnnnnnnnnnnnnnnnnnnnnnnnnnnnnnnnnnnnnnnnnnnnnnnnnnnnnnnnnnnnnnnnnnnnnnnnnnnnnnnnnnnnnnnnnnnnnnnnnnnnnnnnnnnnnnnnnnnnnnnnnnnnnnnnnnnnnnnnnnnnnnnnnnnnnnnnnnnnnnnnnnnnnnnnnnnnnnnnnnnnnnnnnnnnnnnnnnnnnnnnnnnnnnnnnnnnnnnnnnnnnnnnnnnnnnnnnnnnnnnnnnnnnnnnnnnnnnnnnnnnnnnnnnnnnnnnnnnnnnnnnnnnnnnnnnnnnnnnnnnnnnnnnnnnnnnnnnnnnnnnnnnnnnnnnnnnnnnnnnnnnnnnnnnnnnnnnnnnnnnnnnnnnnnnnnnnnnnnnnnnnnnnnnnnnnnnnnnnnnnnnnnnnnnnnnnnnnnnnnnnnnnnnnnnnnnnnnnnnnnnnnnnnnnnnnnnnnnnnnnnnnnnnnnnnnnnnnnnnnnnnnnnnnnnnnnnnnnnnnnnnnnnnnnnnnnnnnnnnnnnnnnnnnnnnnnnnnnnnnnnnnnnnnnnnnnnnnnnnnnnnnnnnnnnnnnnnnnnnnnnnnnnnnnnnnnnnnnnnnnnnnnnnnnnnnnnnnnnnnnnnnnnnnnnnnnnnnnnnnnnnnnnnnnnnnnnnnnnnnnnnnnnnnnnnnnnnnnnnnnnnnnnnnnnnnnnnnnnnnnnnnnnnnnnnnnnnnnnnnnnnnnnnnnnnnnnnnnnnnnnnnnnnnnnnnnnnnnnnnnnnnnnnnnnnnnnnnnnnnnnnnnnnnnnnnnnnnnnnnnnnnnnnnnnnnnnnnnnnnnnnnnnnnnnnnnnnnnnnnnnnnnnnnnnnnnnnnnnnnnnnnnnnnnnnnnnnnnnnnnnnnnnnnnnnnnnnnnnnnnnnnnnnnnnnnnnnnnnnnnnnnnnnnnnnnnnnnnnnnnnnnnnnnnnnnnnnnnnnnnnnnnnnnnnnnnnnnnnnnnnnnnnnnnnnnnnnnnnnnnnnnnnnnnnnnnnnnnnnnnnnnnnnnnnnnnnnnnnnnnnnnnnnnnnnnnnnnnnnnnnnnnnnnnnnnnnnnnnnnnnnnnnnnnnnnnnnnnnnnnnnnnnnnnnnnnnnnnnnnnnnnnnnnnnnnnnnnnnnnnnnnnnnnnnnnnnnnnnnnnnnnnnnnnnnnnnnnnnnnnnnnnnnnnnnnnnnnnnnnnnnnnnnnnnnnnnnnnnnnnnnnnnnnnnnnnnnnnnnnnnnnnnnnnnnnnnnnnnnnnnnnnnnnnnnnnnnnnnnnnnnnnnnnnnnnnnnnnnnnnnnnnnnnnnnnnnnnnnnnnnnnnnnnnnnnnnnnnnnnnnnnnnnnnnnnnnnnnnnnnnnnnnnnnnnnnnnnnnnnnnnnnnnnnnnnnnnnnnnnnnnnnnnnnnnnnnnnnnnnnnnnnnnnnnnnnnnnnnnnnnnnnnnnnnnnnnnnnnnnnnnnnnnnnnnnnnnnnnnnnnnnnnnnnnnnnnnnnnnnnnnnnnnnnnnnnnnnnnnnnnnnnnnnnnnnnnnnnnnnnnnnnnnnnnnnnnnnnnnnnnnnnnnnnnnnnnnnnnnnnnnnnnnnnnnnnnnnnnnnnnnnnnnnnnnnnnnnnnnnnnnnnnnnnnnnnnnnnnnnnnnnnnnnnnnnnnnnnnnnnnnnnnnnnnnnnnnnnnnnnnnnnnnnnnnnnnnnnnnnnnnnnnnnnnnnnnnnnnnnnnnnnnnnnnnnnnnnnnnnnnnnnnnnnnnnnnnnnnnnnnnnnnnnnnnnnnnnnnnnnnnnnnnnnnnnnnnnnnnnnnnnnnnnnnnnnnnnnnnnnnnnnnnnnnnnnnnnnnnnnnnnnnnnnnnnnnnnnnnnnnnnnnnnnnnnnnnnnnnnnnnnnnnnnnnnnnnnnnnnnnnnnnnnnnnnnnnnnnnnnnnnnnnnnnnnnnnnnnnnnnnnnnnnnnnnnnnnnnnnnnnnnnnnnnnnnnnnnnnnnnnnnnnnnnnnnnnnnnnnnnnnnnnnnnnnnnnnnnnnnnnnnnnnnnnnnnnnnnnnnnnnnnnnnnnnnnnnnnnnnnnnnnnnnnnnnnnnnnnnnnnnnnnnnnnnnnnnnnnnnnnnnnnnnnnnnnnnnnnnnnnnnnnnnnnnnnnnnnnnnnnnnnnnnnnnnnnnnnnnnnnnnnnnnnnnnnnnnnnnnnnnnnnnnnnnnnnnnnnnnnnnnnnnnnnnnnnnnnnnnnnnnnnnnnnnnnnnnnnnnnnnnnnnnnnnnnnnnnnnnnnnnnnnnnnnnnnnnnnnnnnnnnnnnnnnnnnnnnnnnnnnnnnnnnnnnnnnnnnnnnnnnnnnnnnnnnnnnnnnnnnnnnnnnnnnnnnnnnnnnnnnnnnnnnnnnnnnnnnnnnnnnnnnnnnnnnnnnnnnnnnnnnnnnnnnnnnnnnnnnnnnnnnnnnnnnnnnnnnnnnnnnnnnnnnnnnnnnnnnnnnnnnnnnnnnnnnnnnnnnnnnnnnnnnnnnnnnnnnnnnnnnnnnnnnnnnnnnnnnnnnnnnnnnnnnnnnnnnnnnnnnnnnnnnnnnnnnnnnnnnnnnnnnnnnnnnnnnnnnnnnnnnnnnnnnnnnnnnnnnnnnnnnnnnnnnnnnnnnnnnnnnnnnnnnnnnnnnnnnnnnnnnnnnnnnnnnnnnnnnnnnnnnnnnnnnnnnnnnnnnnnnnnnnnnnnnnnnnnnnnnnnnnnnnnnnnnnnnnnnnnnnnnnnnnnnnnnnnnnnnnnnnnnnnnnnnnnnnnnnnnnnnnnnnnnnnnnnnnnnnnnnnnnnnnnnnnnnnnnnnnnnnnnnnnnnnnnnnnnnnnnnnnnnnnnnnnnnnnnnnnnnnnnnnnnnnnnnnnnnnnnnnnnnnnnnnnnnnnnnnnnnnnnnnnnnnnnnnnnnnnnnnnnnnnnnnnnnnnnnnnnnnnnnnnnnnnnnnnnnnnnnnnnnnnnnnnnnnnnnnnnnnnnnnnnnnnnnnnnnnnnnnnnnnnnnnnnnnnnnnnnnnnnnnnnnnnnnnnnnnnnnnnnnnnnnnnnnnnnnnnnnnnnnnnnnnnnnnnnnnnnnnnnnnnnnnnnnnnnnnnnnnnnnnnnnnnnnnnnnnnnnnnnnnnnnnnnnnnnnnnnnnnnnnnnnnnnnnnnnnnnnnnnnnnnnnnnnnnnnnnnnnnnnnnnnnnnnnnnnnnnnnnnnnnnnnnnnnnnnnnnnnnnnnnnnnnnnnnnnnnnnnnnnnnnnnnnnnnnnnnnnnnnnnnnnnnnnnnnnnnnnnnnnnnnnnnnnnnnnnnnnnnnnnnnnnnnnnnnnnnnnnnnnnnnnnnnnnnnnnnnnnnnnnnnnnnnnnnnnnnnnnnnnnnnnnnnnnnnnnnnnnnnnnnnnnnnnnnnnnnnnnnnnnnnnnnnnnnnnnnnnnnnnnnnnnnnnnnnnnnnnnnnnnnnnnnnnnnnnnnnnnnnnnnnnnnnnnnnnnnnnnnnnnnnnnnnnnnnnnnnnnnnnnnnnnnnnnnnnnnnnnnnnnnnnnnnnnnnnnnnnnnnnnnnnnnnnnnnnnnnnnnnnnnnnnnnnnnnnnnnnnnnnnnnnnnnnnnnnnnnnnnnnnnnnnnnnnnnnnnnnnnnnnnnnnnnnnnnnnnnnnnnnnnnnnnnnnnnnnnnnnnnnnnnnnnnnnnnnnnnnnnnnnnnnnnnnnnnnnnnnnnnnnnnnnnnnnnnnnnnnnnnnnnnnnnnnnnnnnnnnnnnnnnnnnnnnnnnnnnnnnnnnnnnnnnnnnnnnnnnnnnnnnnnnnnnnnnnnnnnnnnnnnnnnnnnnnnnnnnnnnnnnnnnnnnnnnnnnnnnnnnnnnnnnnnnnnnnnnnnnnnnnnnnnnnnnnnnnnnnnnnnnnnnnnnnnnnnnnnnnnnnnnnnnnnnnnnnnnnnnnnnnnnnnnnnnnnnnnnnnnnnnnnnnnnnnnnnnnnnnnnnnnnnnnnnnnnnnnnnnnnnnnnnnnnnnnnnnnnnnnnnnnnnnnnnnnnnnnnnnnnnnnnnnnnnnnnnnnnnnnnnnnnnnnnnnnnnnnnnnnnnnnnnnnnnnnnnnnnnnnnnnnnnnnnnnnnnnnnnnnnnnnnnnnnnnnnnnnnnnnnnnnnnnnnnnnnnnnnnnnnnnnnnnnnnnnnnnnnnnnnnnnnnnnnnnnnnnnnnnnnnnnnnnnnnnnnnnnnnnnnnnnnnnnnnnnnnnnnnnnnnnnnnnnnnnnnnnnnnnnnnnnnnnnnnnnnnnnnnnnnnnnnnnnnnnnnnnnnnnnnnnnnnnnnnnnnnnnnnnnnnnnnnnnnnnnnnnnnnnnnnnnnnnnnnnnnnnnnnnnnnnnnnnnnnnnnnnnnnnnnnnnnnnnnnnnnnnnnnnnnnnnnnnnnnnnnnnnnnnnnnnnnnnnnnnnnnnnnnnnnnnnnnnnnnnnnnnnnnnnnnnnnnnnnnnnnnnnnnnnnnnnnnnnnnnnnnnnnnnnnnnnnnnnnnnnnnnnnnnnnnnnnnnnnnnnnnnnnnnnnnnnnnnnnnnnnnnnnnnnnnnnnnnnnnnnnnnnnnnnnnnnnnnnnnnnnnnnnnnnnnnnnnnnnnnnnnnnnnnnnnnnnnnnnnnnnnnnnnnnnnnnnnnnnnnnnnnnnnnnnnnnnnnnnnnnnnnnnnnnnnnnnnnnnnnnnnnnnnnnnnnnnnnnnnnnnnnnnnnnnnnnnnnnnnnnnnnnnnnnnnnnnnnnnnnnnnnnnnnnnnnnnnnnnnnnnnnnnnnnnnnnnnnnnnnnnnnnnnnnnnnnnnnnnnnnnnnnnnnnnnnnnnnnnnnnnnnnnnnnnnnnnnnnnnnnnnnnnnnnnnnnnnnnnnnnnnnnnnnnnnnnnnnnnnnnnnnnnnnnnnnnnnnnnnnnnnnnnnnnnnnnnnnnnnnnnnnnnnnnnnnnnnnnnnnnnnnnnnnnnnnnnnnnnnnnnnnnnnnnnnnnnnnnnnnnnnnnnnnnnnnnnnnnnnnnnnnnnnnnnnnnnnnnnnnnnnnnnnnnnnnnnnnnnnnnnnnnnnnnnnnnnnnnnnnnnnnnnnnnnnnnnnnnnnnnnnnnnnnnnnnnnnnnnnnnnnnnnnnnnnnnnnnnnnnnnnnnnnnnnnnnnnnnnnnnnnnnnnnnnnnnnnnnnnnnnnnnnnnnnnnnnnnnnnnnnnnnnnnnnnnnnnnnnnnnnnnnnnnnnnnnnnnnnnnnnnnnnnnnnnnnnnnnnnnnnnnnnnnnnnnnnnnnnnnnnnnnnnnnnnnnnnnnnnnnnnnnnnnnnnnnnnnnnnnnnnnnnnnnnnnnnnnnnnnnnnnnnnnnnnnnnnnnnnnnnnnnnnnnnnnnnnnnnnnnnnnnnnnnnnnnnnnnnnnnnnnnnnnnnnnnnnnnnnnnnnnnnnnnnnnnnnnnnnnnnnnnnnnnnnnnnnnnnnnnnnnnnnnnnnnnnnnnnnnnnnnnnnnnnnnnnnnnnnnnnnnnnnnnnnnnnnnnnnnnnnnnnnnnnnnnnnnnnnnnnnnnnnnnnnnnnnnnnnnnnnnnnnnnnnnnnnnnnnnnnnnnnnnnnnnnnnnnnnnnnnnnnnnnnnnnnnnnnnnnnnnnnnnnnnnnnnnnnnnnnnnnnnnnnnnnnnnnnnnnnnnnnnnnnnnnnnnnnnnnnnnnnnnnnnnnnnnnnnnnnnnnnnnnnnnnnnnnnnnnnnnnnnnnnnnnnnnnnnnnnnnnnnnnnnnnnnnnnnnnnnnnnnnnnnnnnnnnnnnnnnnnnnnnnnnnnnnnnnnnnnnnnnnnnnnnnnnnnnnnnnnnnnnnnnnnnnnnnnnnnnnnnnnnnnnnnnnnnnnnnnnnnnnnnnnnnnnnnnnnnnnnnnnnnnnnnnnnnnnnnnnnnnnnnnnnnnnnnnnnnnnnnnnnnnnnnnnnnnnnnnnnnnnnnnnnnnnnnnnnnnnnnnnnnnnnnnnnnnnnnnnnnnnnnnnnnnnnnnnnnnnnnnnnnnnnnnnnnnnnnnnnnnnnnnnnnnnnnnnnnnnnnnnnnnnnnnnnnnnnnnnnnnnnnnnnnnnnnnnnnnnnnnnnnnnnnnnnnnnnnnnnnnnnnnnnnnnnnnnnnnnnnnnnnnnnnnnnnnnnnnnnnnnnnnnnnnnnnnnnnnnnnnnnnnnnnnnnnnnnnnnnnnnnnnnnnnnnnnnnnnnnnnnnnnnnnnnnnnnnnnnnnnnnnnnnnnnnnnnnnnnnnnnnnnnnnnnnnnnnnnnnnnnnnnnnnnnnnnnnnnnnnnnnnnnnnnnnnnnnnnnnnnnnnnnnnnnnnnnnnnnnnnnnnnnnnnnnnnnnnnnnnnnnnnnnnnnnnnnnnnnnnnnnnnnnnnnnnnnnnnnnnnnnnnnnnnnnnnnnnnnnnnnnnnnnnnnnnnnnnnnnnnnnnnnnnnnnnnnnnnnnnnnnnnnnnnnnnnnnnnnnnnnnnnnnnnnnnnnnnnnnnnnnnnnnnnnnnnnnnnnnnnnnnnnnnnnnnnnnnnnnnnnnnnnnnnnnnnnnnnnnnnnnnnnnnnnnnnnnnnnnnnnnnnnnnnnnnnnnnnnnnnnnnnnnnnnnnnnnnnnnnnnnnnnnnnnnnnnnnnnnnnnnnnnnnnnnnnnnnnnnnnnnnnnnnnnnnnnnnnnnnnnnnnnnnnnnnnnnnnnnnnnnnnnnnnnnnnnnnnnnnnnnnnnnnnnnnnnnnnnnnnnnnnnnnnnnnnnnnnnnnnnnnnnnnnnnnnnnnnnnnnnnnnnnnnnnnnnnnnnnnnnnnnnnnnnnnnnnnnnnnnnnnnnnnnnnnnnnnnnnnnnnnnnnnnnnnnnnnnnnnnnnnnnnnnnnnnnnnnnnnnnnnnnnnnnnnnnnnnnnnnnnnnnnnnnnnnnnnnnnnnnnnnnnnnnnnnnnnnnnnnnnnnnnnnnnnnnnnnnnnnnnnnnnnnnnnnnnnnnnnnnnnnnnnnnnnnnnnnnnnnnnnnnnnnnnnnnnnnnnnnnnnnnnnnnnnnnnnnnnnnnnnnnnnnnnnnnnnnnnnnnnnnnnnnnnnnnnnnnnnnnnnnnnnnnnnnnnnnnnnnnnnnnnnnnnnnnnnnnnnnnnnnnnnnnnnnnnnnnnnnnnnnnnnnnnnnnnnnnnnnnnnnnnnnnnnnnnnnnnnnnnnnnnnnnnnnnnnnnnnnnnnnnnnnnnnnnnnnnnnnnnnnnnnnnnnnnnnnnnnnnnnnnnnnnnnnnnnnnnnnnnnnnnnnnnnnnnnnnnnnnnnnnnnnnnnnnnnnnnnnnnnnnnnnnnnnnnnnnnnnnnnnnnnnnnnnnnnnnnnnnnnnnnnnnnnnnnnnnnnnnnnnnnnnnnnnnnnnnnnnnnnnnnnnnnnnnnnnnnnnnnnnnnnnnnnnnnnnnnnnnnnnnnnnnnnnnnnnnnnnnnnnnnnnnnnnnnnnnnnnnnnnnnnnnnnnnnnnnnnnnnnnnnnnnnnnnnnnnnnnnnnnnnnnnnnnnnnnnnnnnnnnnnnnnnnnnnnnnnnnnnnnnnnnnnnnnnnnnnnnnnnnnnnnnnnnnnnnnnnnnnnnnnnnnnnnnnnnnnnnnnnnnnnnnnnnnnnnnnnnnnnnnnnnnnnnnnnnnnnnnnnnnnnnnnnnnnnnnnnnnnnnnnnnnnnnnnnnnnnnnnnnnnnnnnnnnnnnnnnnnnnnnnnnnnnnnnnnnnnnnnnnnnnnnnnnnnnnnnnnnnnnnnnnnnnnnnnnnnnnnnnnnnnnnnnnnnnnnnnnnnnnnnnnnnnnnnnnnnnnnnnnnnnnnnnnnnnnnnnnnnnnnnnnnnnnnnnnnnnnnnnnnnnnnnnnnnnnnnnnnnnnnnnnnnnnnnnnnnnnnnnnnnnnnnnnnnnnnnnnnnnnnnnnnnnnnnnnnnnnnnnnnnnnnnnnnnnnnnnnnnnnnnnnnnnnnnnnnnnnnnnnnnnnnnnnnnnnnnnnnnnnnnnnnnnnnnnnnnnnnnnnnnnnnnnnnnnnnnnnnnnnnnnnnnnnnnnnnnnnnnnnnnnnnnnnnnnnnnnnnnnnnnnnnnnnnnnnnnnnnnnnnnnnnnnnnnnnnnnnnnnnnnnnnnnnnnnnnnnnnnnnnnnnnnnnnnnnnnnnnnnnnnnnnnnnnnnnnnnnnnnnnnnnnnnnnnnnnnnnnnnnnnnnnnnnnnnnnnnnnnnnnnnnnnnnnnnnnnnnnnnnnnnnnnnnnnnnnnnnnnnnnnnnnnnnnnnnnnnnnnnnnnnnnnnnnnnnnnnnnnnnnnnnnnnnnnnnnnnnnnnnnnnnnnnnnnnnnnnnnnnnnnnnnnnnnnnnnnnnnnnnnnnnnnnnnnnnnnnnnnnnnnnnnnnnnnnnnnnnnnnnnnnnnnnnnnnnnnnnnnnnnnnnnnnnnnnnnnnnnnnnnnnnnnnnnnnnnnnnnnnnnnnnnnnnnnnnnnnnnnnnnnnnnnnnnnnnnnnnnnnnnnnnnnnnnnnnnnnnnnnnnnnnnnnnnnnnnnnnnnnnnnnnnnnnnnnnnnnnnnnnnnnnnnnnnnnnnnnnnnnnnnnnnnnnnnnnnnnnnnnnnnnnnnnnnnnnnnnnnnnnnnnnnnnnnnnnnnnnnnnnnnnnnnnnnnnnnnnnnnnnnnnnnnnnnnnnnnnnnnnnnnnnnnnnnnnnnnnnnnnnnnnnnnnnnnnnnnnnnnnnnnnnnnnnnnnnnnnnnnnnnnnnnnnnnnnnnnnnnnnnnnnnnnnnnnnnnnnnnnnnnnnnnnnnnnnnnnnnnnnnnnnnnnnnnnnnnnnnnnnnnnnnnnnnnnnnnnnnnnnnnnnnnnnnnnnnnnnnnnnnnnnnnnnnnnnnnnnnnnnnnnnnnnnnnnnnnnnnnnnnnnnnnnnnnnnnnnnnnnnnnnnnnnnnnnnnnnnnnnnnnnnnnnnnnnnnnnnnnnnnnnnnnnnnnnnnnnnnnnnnnnnnnnnnnnnnnnnnnnnnnnnnnnnnnnnnnnnnnnnnnnnnnnnnnnnnnnnnnnnnnnnnnnnnnnnnnnnnnnnnnnnnnnnnnnnnnnnnnnnnnnnnnnnnnnnnnnnnnnnnnnnnnnnnnnnnnnnnnnnnnnnnnnnnnnnnnnnnnnnnnnnnnnnnnnnnnnnnnnnnnnnnnnnnnnnnnnnnnnnnnnnnnnnnnnnnnnnnnnnnnnnnnnnnnnnnnnnnnnnnnnnnnnnnnnnnnnnnnnnnnnnnnnnnnnnnnnnnnnnnnnnnnnnnnnnnnnnnnnnnnnnnnnnnnnnnnnnnnnnnnnnnnnnnnnnnnnnnnnnnnnnnnnnnnnnnnnnnnnnnnnnnnnnnnnnnnnnnnnnnnnnnnnnnnnnnnnnnnnnnnnnnnnnnnnnnnnnnnnnnnnnnnnnnnnnnnnnnnnnnnnnnnnnnnnnnnnnnnnnnnnnnnnnnnnnnnnnnnnnnnnnnnnnnnnnnnnnnnnnnnnnnnnnnnnnnnnnnnnnnnnnnnnnnnnnnnnnnnnnnnnnnnnnnnnnnnnnnnnnnnnnnnnnnnnnnnnnnnnnnnnnnnnnnnnnnnnnnnnnnnnnnnnnnnnnnnnnnnnnnnnnnnnnnnnnnnnnnnnnnnnnnnnnnnnnnnnnnnnnnnnnnnnnnnnnnnnnnnnnnnnnnnnnnnnnnnnnnnnnnnnnnnnnnnnnnnnnnnnnnnnnnnnnnnnnnnnnnnnnnnnnnnnnnnnnnnnnnnnnnnnnnnnnnnnnnnnnnnnnnnnnnnnnnnnnnnnnnnnnnnnnnnnnnnnnnnnnnnnnnnnnnnnnnnnnnnnnnnnnnnnnnnnnnnnnnnnnnnnnnnnnnnnnnnnnnnnnnnnnnnnnnnnnnnnnnnnnnnnnnnnnnnnnnnnnnnnnnnnnnnnnnnnnnnnnnnnnnnnnnnnnnnnnnnnnnnnnnnnnnnnnnnnnnnnnnnnnnnnnnnnnnnnnnnnnnnnnnnnnnnnnnnnnnnnnnnnnnnnnnnnnnnnnnnnnnnnnnnnnnnnnnnnnnnnnnnnnnnnnnnnnnnnnnnnnnnnnnnnnnnnnnnnnnnnnnnnnnnnnnnnnnnnnnnnnnnnnnnnnnnnnnnnnnnnnnnnnnnnnnnnnnnnnnnnnnnnnnnnnnnnnnnnnnnnnnnnnnnnnnnnnnnnnnnnnnnnnnnnnnnnnnnnnnnnnnnnnnnnnnnnnnnnnnnnnnnnnnnnnnnnnnnnnnnnnnnnnnnnnnnnnnnnnnnnnnnnnnnnnnnnnnnnnnnnnnnnnnnnnnnnnnnnnnnnnnnnnnnnnnnnnnnnnnnnnnnnnnnnnnnnnnnnnnnnnnnnnnnnnnnnnnnnnnnnnnnnnnnnnnnnnnnnnnnnnnnnnnnnnnnnnnnnnnnnnnnnnnnnnnnnnnnnnnnnnnnnnnnnnnnnnnnnnnnnnnnnnnnnnnnnnnnnnnnnnnnnnnnnnnnnnnnnnnnnnnnnnnnnnnnnnnnnnnnnnnnnnnnnnnnnnnnnnnnnnnnnnnnnnnnnnnnnnnnnnnnnnnnnnnnnnnnnnnnnnnnnnnnnnnnnnnnnnnnnnnnnnnnnnnnnnnnnnnnnnnnnnnnnnnnnnnnnnnnnnnnnnnnnnnnnnnnnnnnnnnnnnnnnnnnnnnnnnnnnnnnnnnnnnnnnnnnnnnnnnnnnnnnnnnnnnnnnnnnnnnnnnnnnnnnnnnnnnnnnnnnnnnnnnnnnnnnnnnnnnnnnnnnnnnnnnnnnnnnnnnnnnnnnnnnnnnnnnnnnnnnnnnnnnnnnnnnnnnnnnnnnnnnnnnnnnnnnnnnnnnnnnnnnnnnnnnnnnnnnnnnnnnnnnnnnnnnnnnnnnnnnnnnnnnnnnnnnnnnnnnnnnnnnnnnnnnnnnnnnnnnnnnnnnnnnnnnnnnnnnnnnnnnnnnnnnnnnnnnnnnnnnnnnnnnnnnnnnnnnnnnnnnnnnnnnnnnnnnnnnnnnnnnnnnnnnnnnnnnnnnnnnnnnnnnnnnnnnnnnnnnnnnnnnnnnnnnnnnnnnnnnnnnnnnnnnnnnnnnnnnnnnnnnnnnnnnnnnnnnnnnnnnnnnnnnnnnnnnnnnnnnnnnnnnnnnnnnnnnnnnnnnnnnnnnnnnnnnnnnnnnnnnnnnnnnnnnnnnnnnnnnnnnnnnnnnnnnnnnnnnnnnnnnnnnnnnnnnnnnnnnnnnnnnnnnnnnnnnnnnnnnnnnnnnnnnnnnnnnnnnnnnnnnnnnnnnnnnnnnnnnnnnnnnnnnnnnnnnnnnnnnnnnnnnnnnnnnnnnnnnnnnnnnnnnnnnnnnnnnnnnnnnnnnnnnnnnnnnnnnnnnnnnnnnnnnnnnnnnnnnnnnnnnnnnnnnnnnnnnnnnnnnnnnnnnnnnnnnnnnnnnnnnnnnnnnnnnnnnnnnnnnnnnnnnnnnnnnnnnnnnnnnnnnnnnnnnnnnnnnnnnnnnnnnnnnnnnnnnnnnnnnnnnnnnnnnnnnnnnnnnnnnnnnnnnnnnnnnnnnnnnnnnnnnnnnnnnnnnnnnnnnnnnnnnnnnnnnnnnnnnnnnnnnnnnnnnnnnnnnnnnnnnnnnnnnnnnnnnnnnnnnnnnnnnnnnnnnnnnnnnnnnnnnnnnnnnnnnnnnnnnnnnnnnnnnnnnnnnnnnnnnnnnnnnnnnnnnnnnnnnnnnnnnnnnnnnnnnnnnnnnnnnnnnnnnnnnnnnnnnnnnnnnnnnnnnnnnnnnnnnnnnnnnnnnnnnnnnnnnnnnnnnnnnnnnnnnnnnnnnnnnnnnnnnnnnnnnnnnnnnnnnnnnnnnnnnnnnnnnnnnnnnnnnnnnnnnnnnnnnnnnnnnnnnnnnnnnnnnnnnnnnnnnnnnnnnnnnnnnnnnnnnnnnnnnnnnnnnnnnnnnnnnnnnnnnnnnnnnnnnnnnnnnnnnnnnnnnnnnnnnnnnnnnnnnnnnnnnnnnnnnnnnnnnnnnnnnnnnnnnnnnnnnnnnnnnnnnnnnnnnnnnnnnnnnnnnnnnnnnnnnnnnnnnnnnnnnnnnnnnnnnnnnnnnnnnnnnnnnnnnnnnnnnnnnnnnnnnnnnnnnnnnnnnnnnnnnnnnnnnnnnnnnnnnnnnnnnnnnnnnnnnnnnnnnnnnnnnnnnnnnnnnnnnnnnnnnnnnnnnnnnnnnnnnnnnnnnnnnnnnnnnnnnnnnnnnnnnnnnnnnnnnnnnnnnnnnnnnnnnnnnnnnnnnnnnnnnnnnnnnnnnnnnnnnnnnnnnnnnnnnnnnnnnnnnnnnnnnnnnnnnnnnnnnnnnnnnnnnnnnnnnnnnnnnnnnnnnnnnnnnnnnnnnnnnnnnnnnnnnnnnnnnnnnnnnnnnnnnnnnnnnnnnnnnnnnnnnnnnnnnnnnnnnnnnnnnnnnnnnnnnnnnnnnnnnnnnnnnnnnnnnnnnnnnnnnnnnnnnnnnnnnnnnnnnnnnnnnnnnnnnnnnnnnnnnnnnnnnnnnnnnnnnnnnnnnnnnnnnnnnnnnnnnnnnnnnnnnnnnnnnnnnnnnnnnnnnnnnnnnnnnnnnnnnnnnnnnnnnnnnnnnnnnnnnnnnnnnnnnnnnnnnnnnnnnnnnnnnnnnnnnnnnnnnnnnnnnnnnnnnnnnnnnnnnnnnnnnnnnnnnnnnnnnnnnnnnnnnnnnnnnnnnnnnnnnnnnnnnnnnnnnnnnnnnnnnnnnnnnnnnnnnnnnnnnnnnnnnnnnnnnnnnnnnnnnnnnnnnnnnnnnnnnnnnnnnnnnnnnnnnnnnnnnnnnnnnnnnnnnnnnnnnnnnnnnnnnnnnnnnnnnnnnnnnnnnnnnnnnnnnnnnnnnnnnnnnnnnnnnnnnnnnnnnnnnnnnnnnnnnnnnnnnnnnnnnnnnnnnnnnnnnnnnnnnnnnnnnnnnnnnnnnnnnnnnnnnnnnnnnnnnnnnnnnnnnnnnnnnnnnnnnnnnnnnnnnnnnnnnnnnnnnnnnnnnnnnnnnnnnnnnnnnnnnnnnnnnnnnnnnnnnnnnnnnnnnnnnnnnnnnnnnnnnnnnnnnnnnnnnnnnnnnnnnnnnnnnnnnnnnnnnnnnnnnnnnnnnnnnnnnnnnnnnnnnnnnnnnnnnnnnnnnnnnnnnnnnnnnnnnnnnnnnnnnnnnnnnnnnnnnnnnnnnnnnnnnnnnnnnnnnnnnnnnnnnnnnnnnnnnnnnnnnnnnnnnnnnnnnnnnnnnnnnnnnnnnnnnnnnnnnnnnnnnnnnnnnnnnnnnnnnnnnnnnnnnnnnnnnnnnnnnnnnnnnnnnnnnnnnnnnnnnnnnnnnnnnnnnnnnnnnnnnnnnnnnnnnnnnnnnnnnnnnnnnnnnnnnnnnnnnnnnnnnnnnnnnnnnnnnnnnnnnnnnnnnnnnnnnnnnnnnnnnnnnnnnnnnnnnnnnnnnnnnnnnnnnnnnnnnnnnnnnnnnnnnnnnnnnnnnnnnnnnnnnnnnnnnnnnnnnnnnnnnnnnnnnnnnnnnnnnnnnnnnnnnnnnnnnnnnnnnnnnnnnnnnnnnnnnnnnnnnnnnnnnnnnnnnnnnnnnnnnnnnnnnnnnnnnnnnnnnnnnnnnnnnnnnnnnnnnnnnnnnnnnnnnnnnnnnnnnnnnnnnnnnnnnnnnnnnnnnnnnnnnnnnnnnnnnnnnnnnnnnnnnnnnnnnnnnnnnnnnnnnnnnnnnnnnnnnnnnnnnnnnnnnnnnnnnnnnnnnnnnnnnnnnnnnnnnnnnnnnnnnnnnnnnnnnnnnnnnnnnnnnnnnnnnnnnnnnnnnnnnnnnnnnnnnnnnnnnnnnnnnnnnnnnnnnnnnnnnnnnnnnnnnnnnnnnnnnnnnnnnnnnnnnnnnnnnnnnnnnnnnnnnnnnnnnnnnnnnnnnnnnnnnnnnnnnnnnnnnnnnnnnnnnnnnnnnnnnnnnnnnnnnnnnnnnnnnnnnnnnnnnnnnnnnnnnnnnnnnnnnnnnnnnnnnnnnnnnnnnnnnnnnnnnnnnnnnnnnnnnnnnnnnnnnnnnnnnnnnnnnnnnnnnnnnnnnnnnnnnnnnnnnnnnnnnnnnnnnnnnnnnnnnnnnnnnnnnnnnnnnnnnnnnnnnnnnnnnnnnnnnnnnnnnnnnnnnnnnnnnnnnnnnnnnnnnnnnnnnnnnnnnnnnnnnnnnnnnnnnnnnnnnnnnnnnnnnnnnnnnnnnnnnnnnnnnnnnnnnnnnnnnnnnnnnnnnnnnnnnnnnnnnnnnnnnnnnnnnnnnnnnnnnnnnnnnnnnnnnnnnnnnnnnnnnnnnnnnnnnnnnnnnnnnnnnnnnnnnnnnnnnnnnnnnnnnnnnnnnnnnnnnnnnnnnnnnnnnnnnnnnnnnnnnnnnnnnnnnnnnnnnnnnnnnnnnnnnnnnnnnnnnnnnnnnnnnnnnnnnnnnnnnnnnnnnnnnnnnnnnnnnnnnnnnnnnnnnnnnnnnnnnnnnnnnnnnnnnnnnnnnnnnnnnnnnnnnnnnnnnnnnnnnnnnnnnnnnnnnnnnnnnnnnnnnnnnnnnnnnnnnnnnnnnnnnnnnnnnnnnnnnnnnnnnnnnnnnnnnnnnnnnnnnnnnnnnnnnnnnnnnnnnnnnnnnnnnnnnnnnnnnnnnnnnnnnnnnnnnnnnnnnnnnnnnnnnnnnnnnnnnnnnnnnnnnnnnnnnnnnnnnnnnnnnnnnnnnnnnnnnnnnnnnnnnnnnnnnnnnnnnnnnnnnnnnnnnnnnnnnnnnnnnnnnnnnnnnnnnnnnnnnnnnnnnnnnnnnnnnnnnnnnnnnnnnnnnnnnnnnnnnnnnnnnnnnnnnnnnnnnnnnnnnnnnnnnnnnnnnnnnnnnnnnnnnnnnnnnnnnnnnnnnnnnnnnnnnnnnnnnnnnnnnnnnnnnnnnnnnnnnnnnnnnnnnnnnnnnnnnnnnnnnnnnnnnnnnnnnnnnnnnnnnnnnnnnnnnnnnnnnnnnnnnnnnnnnnnnnnnnnnnnnnnnnnnnnnnnnnnnnnnnnnnnnnnnnnnnnnnnnnnnnnnnnnnnnnnnnnnnnnnnnnnnnnnnnnnnnnnnnnnnnnnnnnnnnnnnnnnnnnnnnnnnnnnnnnnnnnnnnnnnnnnnnnnnnnnnnnnnnnnnnnnnnnnnnnnnnnnnnnnnnnnnnnnnnnnnnnnnnnnnnnnnnnnnnnnnnnnnnnnnnnnnnnnnnnnnnnnnnnnnnnnnnnnnnnnnnnnnnnnnnnnnnnnnnnnnnnnnnnnnnnnnnnnnnnnnnnnnnnnnnnnnnnnnnnnnnnnnnnnnnnnnnnnnnnnnnnnnnnnnnnnnnnnnnnnnnnnnnnnnnnnnnnnnnnnnnnnnnnnnnnnnnnnnnnnnnnnnnnnnnnnnnnnnnnnnnnnnnnnnnnnnnnnnnnnnnnnnnnnnnnnnnnnnnnnnnnnnnnnnnnnnnnnnnnnnnnnnnnnnnnnnnnnnnnnnnnnnnnnnnnnnnnnnnnnnnnnnnnnnnnnnnnnnnnnnnnnnnnnnnnnnnnnnnnnnnnnnnnnnnnnnnnnnnnnnnnnnnnnnnnnnnnnnnnnnnnnnnnnnnnnnnnnnnnnnnnnnnnnnnnnnnnnnnnnnnnnnnnnnnnnnnnnnnnnnnnnnnnnnnnnnnnnnnnnnnnnnnnnnnnnnnnnnnnnnnnnnnnnnnnnnnnnnnnnnnnnnnnnnnnnnnnnnnnnnnnnnnnnnnnnnnnnnnnnnnnnnnnnnnnnnnnnnnnnnnnnnnnnnnnnnnnnnnnnnnnnnnnnnnnnnnnnnnnnnnnnnnnnnnnnnnnnnnnnnnnnnnnnnnnnnnnnnnnnnnnnnnnnnnnnnnnnnnnnnnnnnnnnnnnnnnnnnnnnnnnnnnnnnnnnnnnnnnnnnnnnnnnnnnnnnnnnnnnnnnnnnnnnnnnnnnnnnnnnnnnnnnnnnnnnnnnnnnnnnnnnnnnnnnnnnnnnnnnnnnnnnnnnnnnnnnnnnnnnnnnnnnnnnnnnnnnnnnnnnnnnnnnnnnnnnnnnnnnnnnnnnnnnnnnnnnnnnnnnnnnnnnnnnnnnnnnnnnnnnnnnnnnnnnnnnnnnnnnnnnnnnnnnnnnnnnnnnnnnnnnnnnnnnnnnnnnnnnnnnnnnnnnnnnnnnnnnnnnnnnnnnnnnnnnnnnnnnnnnnnnnnnnnnnnnnnnnnnnnnnnnnnnnnnnnnnnnnnnnnnnnnnnnnnnnnnnnnnnnnnnnnnnnnnnnnnnnnnnnnnnnnnnnnnnnnnnnnnnnnnnnnnnnnnnnnnnnnnnnnnnnnnnnnnnnnnnnnnnnnnnnnnnnnnnnnnnnnnnnnnnnnnnnnnnnnnnnnnnnnnnnnnnnnnnnnnnnnnnnnnnnnnnnnnnnnnnnnnnnnnnnnnnnnnnnnnnnnnnnnnnnnnnnnnnnnnnnnnnnnnnnnnnnnnnnnnnnnnnnnnnnnnnnnnnnnnnnnnnnnnnnnnnnnnnnnnnnnnnnnnnnnnnnnnnnnnnnnnnnnnnnnnnnnnnnnnnnnnnnnnnnnnnnnnnnnnnnnnnnnnnnnnnnnnnnnnnnnnnnnnnnnnnnnnnnnnnnnnnnnnnnnnnnnnnnnnnnnnnnnnnnnnnnnnnnnnnnnnnnnnnnnnnnnnnnnnnnnnnnnnnnnnnnnnnnnnnnnnnnnnnnnnnnnnnnnnnnnnnnnnnnnnnnnnnnnnnnnnnnnnnnnnnnnnnnnnnnnnnnnnnnnnnnnnnnnnnnnnnnnnnnnnnnnnnnnnnnnnnnnnnnnnnnnnnnnnnnnnnnnnnnnnnnnnnnnnnnnnnnnnnnnnnnnnnnnnnnnnnnnnnnnnnnnnnnnnnnnnnnnnnnnnnnnnnnnnnnnnnnnnnnnnnnnnnnnnnnnnnnnnnnnnnnnnnnnnnnnnnnnnnnnnnnnnnnnnnnnnnnnnnnnnnnnnnnnnnnnnnnnnnnnnnnnnnnnnnnnnnnnnnnnnnnnnnnnnnnnnnnnnnnnnnnnnnnnnnnnnnnnnnnnnnnnnnnnnnnnnnnnnnnnnnnnnnnnnnnnnnnnnnnnnnnnnnnnnnnnnnnnnnnnnnnnnnnnnnnnnnnnnnnnnnnnnnnnnnnnnnnnnnnnnnnnnnnnnnnnnnnnnnnnnnnnnnnnnnnnnnnnnnnnnnnnnnnnnnnnnnnnnnnnnnnnnnnnnnnnnnnnnnnnnnnnnnnnnnnnnnnnnnnnnnnnnnnnnnnnnnnnnnnnnnnnnnnnnnnnnnnnnnnnnnnnnnnnnnnnnnnnnnnnnnnnnnnnnnnnnnnnnnnnnnnnnnnnnnnnnnnnnnnnnnnnnnnnnnnnnnnnnnnnnnnnnnnnnnnnnnnnnnnnnnnnnnnnnnnnnnnnnnnnnnnnnnnnnnnnnnnnnnnnnnnnnnnnnnnnnnnnnnnnnnnnnnnnnnnnnnnnnnnnnnnnnnnnnnnnnnnnnnnnnnnnnnnnnnnnnnnnnnnnnnnnnnnnnnnnnnnnnnnnnnnnnnnnnnnnnnnnnnnnnnnnnnnnnnnnnnnnnnnnnnnnnnnnnnnnnnnnnnnnnnnnnnnnnnnnnnnnnnnnnnnnnnnnnnnnnnnnnnnnnnnnnnnnnnnnnnnnnnnnnnnnnnnnnnnnnnnnnnnnnnnnnnnnnnnnnnnnnnnnnnnnnnnnnnnnnnnnnnnnnnnnnnnnnnnnnnnnnnnnnnnnnnnnnnnnnnnnnnnnnnnnnnnnnnnnnnnnnnnnnnnnnnnnnnnnnnnnnnnnnnnnnnnnnnnnnnnnnnnnnnnnnnnnnnnnnnnnnnnnnnnnnnnnnnnnnnnnnnnnnnnnnnnnnnnnnnnnnnnnnnnnnnnnnnnnnnnnnnnnnnnnnnnnnnnnnnnnnnnnnnnnnnnnnnnnnnnnnnnnnnnnnnnnnnnnnnnnnnnnnnnnnnnnnnnnnnnnnnnnnnnnnnnnnnnnnnnnnnnnnnnnnnnnnnnnnnnnnnnnnnnnnnnnnnnnnnnnnnnnnnnnnnnnnnnnnnnnnnnnnnnnnnnnnnnnnnnnnnnnnnnnnnnnnnnnnnnnnnnnnnnnnnnnnnnnnnnnnnnnnnnnnnnnnnnnnnnnnnnnnnnnnnnnnnnnnnnnnnnnnnnnnnnnnnnnnnnnnnnnnnnnnnnnnnnnnnnnnnnnnnnnnnnnnnnnnnnnnnnnnnnnnnnnnnnnnnnnnnnnnnnnnnnnnnnnnnnnnnnnnnnnnnnnnnnnnnnnnnnnnnnnnnnnnnnnnnnnnnnnnnnnnnnnnnnnnnnnnnnnnnnnnnnnnnnnnnnnnnnnnnnnnnnnnnnnnnnnnnnnnnnnnnnnnnnnnnnnnnnnnnnnnnnnnnnnnnnnnnnnnnnnnnnnnnnnnnnnnnnnnnnnnnnnnnnnnnnnnnnnnnnnnnnnnnnnnnnnnnnnnnnnnnnnnnnnnnnnnnnnnnnnnnnnnnnnnnnnnnnnnnnnnnnnnnnnnnnnnnnnnnnnnnnnnnnnnnnnnnnnnnnnnnnnnnnnnnnnnnnnnnnnnnnnnnnnnnnnnnnnnnnnnnnnnnnnnnnnnnnnnnnnnnnnnnnnnnnnnnnnnnnnnnnnnnnnnnnnnnnnnnnnnnnnnnnnnnnnnnnnnnnnnnnnnnnnnnnnnnnnnnnnnnnnnnnnnnnnnnnnnnnnnnnnnnnnnnnnnnnnnnnnnnnnnnnnnnnnnnnnnnnnnnnnnnnnnnnnnnnnnnnnnnnnnnnnnnnnnnnnnnnnnnnnnnnnnnnnnnnnnnnnnnnnnnnnnnnnnnnnnnnnnnnnnnnnnnnnnnnnnnnnnnnnnnnnnnnnnnnnnnnnnnnnnnnnnnnnnnnnnnnnnnnnnnnnnnnnnnnnnnnnnnnnnnnnnnnnnnnnnnnnnnnnnnnnnnnnnnnnnnnnnnnnnnnnnnnnnnnnnnnnnnnnnnnnnnnnnnnnnnnnnnnnnnnnnnnnnnnnnnnnnnnnnnnnnnnnnnnnnnnnnnnnnnnnnnnnnnnnnnnnnnnnnnnnnnnnnnnnnnnnnnnnnnnnnnnnnnnnnnnnnnnnnnnnnnnnnnnnnnnnnnnnnnnnnnnnnnnnnnnnnnnnnnnnnnnnnnnnnnnnnnnnnnnnnnnnnnnnnnnnnnnnnnnnnnnnnnnnnnnnnnnnnnnnnnnnnnnnnnnnnnnnnnnnnnnnnnnnnnnnnnnnnnnnnnnnnnnnnnnnnnnnnnnnnnnnnnnnnnnnnnnnnnnnnnnnnnnnnnnnnnnnnnnnnnnnnnnnnnnnnnnnnnnnnnnnnnnnnnnnnnnnnnnnnnnnnnnnnnnnnnnnnnnnnnnnnnnnnnnnnnnnnnnnnnnnnnnnnnnnnnnnnnnnnnnnnnnnnnnnnnnnnnnnnnnnnnnnnnnnnnnnnnnnnnnnnnnnnnnnnnnnnnnnnnnnnnnnnnnnnnnnnnnnnnnnnnnnnnnnnnnnnnnnnnnnnnnnnnnnnnnnnnnnnnnnnnnnnnnnnnnnnnnnnnnnnnnnnnnnnnnnnnnnnnnnnnnnnnnnnnnnnnnnnnnnnnnnnnnnnnnnnnnnnnnnnnnnnnnnnnnnnnnnnnnnnnnnnnnnnnnnnnnnnnnnnnnnnnnnnnnnnnnnnnnnnnnnnnnnnnnnnnnnnnnnnnnnnnnnnnnnnnnnnnnnnnnnnnnnnnnnnnnnnnnnnnnnnnnnnnnnnnnnnnnnnnnnnnnnnnnnnnnnnnnnnnnnnnnnnnnnnnnnnnnnnnnnnnnnnnnnnnnnnnnnnnnnnnnnnnnnnnnnnnnnnnnnnnnnnnnnnnnnnnnnnnnnnnnnnnnnnnnnnnnnnnnnnnnnnnnnnnnnnnnnnnnnnnnnnnnnnnnnnnnnnnnnnnnnnnnnnnnnnnnnnnnnnnnnnnnnnnnnnnnnnnnnnnnnnnnnnnnnnnnnnnnnnnnnnnnnnnnnnnnnnnnnnnnnnnnnnnnnnnnnnnnnnnnnnnnnnnnnnnnnnnnnnnnnnnnnnnnnnnnnnnnnnnnnnnnnnnnnnnnnnnnnnnnnnnnnnnnnnnnnnnnnnnnnnnnnnnnnnnnnnnnnnnnnnnnnnnnnnnnnnnnnnnnnnnnnnnnnnnnnnnnnnnnnnnnnnnnnnnnnnnnnnnnnnnnnnnnnnnnnnnnnnnnnnnnnnnnnnnnnnnnnnnnnnnnnnnnnnnnnnnnnnnnnnnnnnnnnnnnnnnnnnnnnnnnnnnnnnnnnnnnnnnnnnnnnnnnnnnnnnnnnnnnnnnnnnnnnnnnnnnnnnnnnnnnnnnnnnnnnnnnnnnnnnnnnnnnnnnnnnnnnnnnnnnnnnnnnnnnnnnnnnnnnnnnnnnnnnnnnnnnnnnnnnnnnnnnnnnnnnnnnnnnnnnnnnnnnnnnnnnnnnnnnnnnnnnnnnnnnnnnnnnnnnnnnnnnnnnnnnnnnnnnnnnnnnnnnnnnnnnnnnnnnnnnnnnnnnnnnnnnnnnnnnnnnnnnnnnnnnnnnnnnnnnnnnnnnnnnnnnnnnnnnnnnnnnnnnnnnnnnnnnnnnnnnnnnnnnnnnnnnnnnnnnnnnnnnnnnnnnnnnnnnnnnnnnnnnnnnnnnnnnnnnnnnnnnnnnnnnnnnnnnnnnnnnnnnnnnnnnnnnnnnnnnnnnnnnnnnnnnnnnnnnnnnnnnnnnnnnnnnnnnnnnnnnnnnnnnnnnnnnnnnnnnnnnnnnnnnnnnnnnnnnnnnnnnnnnnnnnnnnnnnnnnnnnnnnnnnnnnnnnnnnnnnnnnnnnnnnnnnnnnnnnnnnnnnnnnnnnnnnnnnnnnnnnnnnnnnnnnnnnnnnnnnnnnnnnnnnnnnnnnnnnnnnnnnnnnnnnnnnnnnnnnnnnnnnnnnnnnnnnnnnnnnnnnnnnnnnnnnnnnnnnnnnnnnnnnnnnnnnnnnnnnnnnnnnnnnnnnnnnnnnnnnnnnnnnnnnnnnnnnnnnnnnnnnnnnnnnnnnnnnnnnnnnnnnnnnnnnnnnnnnnnnnnnnnnnnnnnnnnnnnnnnnnnnnnnnnnnnnnnnnnnnnnnnnnnnnnnnnnnnnnnnnnnnnnnnnnnnnnnnnnnnnnnnnnnnnnnnnnnnnnnnnnnnnnnnnnnnnnnnnnnnnnnnnnnnnnnnnnnnnnnnnnnnnnnnnnnnnnnnnnnnnnnnnnnnnnnnnnnnnnnnnnnnnnnnnnnnnnnnnnnnnnnnnnnnnnnnnnnnnnnnnnnnnnnnnnnnnnnnnnnnnnnnnnnnnnnnnnnnnnnnnnnnnnnnnnnnnnnnnnnnnnnnnnnnnnnnnnnnnnnnnnnnnnnnnnnnnnnnnnnnnnnnnnnnnnnnnnnnnnnnnnnnnnnnnnnnnnnnnnnnnnnnnnnnnnnnnnnnnnnnnnnnnnnnnnnnnnnnnnnnnnnnnnnnnnnnnnnnnnnnnnnnnnnnnnnnnnnnnnnnnnnnnnnnnnnnnnnnnnnnnnnnnnnnnnnnnnnnnnnnnnnnnnnnnnnnnnnnnnnnnnnnnnnnnnnnnnnnnnnnnnnnnnnnnnnnnnnnnnnnnnnnnnnnnnnnnnnnnnnnnnnnnnnnnnnnnnnnnnnnnnnnnnnnnnnnnnnnnnnnnnnnnnnnnnnnnnnnnnnnnnnnnnnnnnnnnnnnnnnnnnnnnnnnnnnnnnnnnnnnnnnnnnnnnnnnnnnnnnnnnnnnnnnnnnnnnnnnnnnnnnnnnnnnnnnnnnnnnnnnnnnnnnnnnnnnnnnnnnnnnnnnnnnnnnnnnnnnnnnnnnnnnnnnnnnnnnnnnnnnnnnnnnnnnnnnnnnnnnnnnnnnnnnnnnnnnnnnnnnnnnnnnnnnnnnnnnnnnnnnnnnnnnnnnnnnnnnnnnnnnnnnnnnnnnnnnnnnnnnnnnnnnnnnnnnnnnnnnnnnnnnnnnnnnnnnnnnnnnnnnnnnnnnnnnnnnnnnnnnnnnnnnnnnnnnnnnnnnnnnnnnnnnnnnnnnnnnnnnnnnnnnnnnnnnnnnnnnnnnnnnnnnnnnnnnnnnnnnnnnnnnnnnnnnnnnnnnnnnnnnnnnnnnnnnnnnnnnnnnnnnnnnnnnnnnnnnnnnnnnnnnnnnnnnnnnnnnnnnnnnnnnnnnnnnnnnnnnnnnnnnnnnnnnnnnnnnnnnnnnnnnnnnnnnnnnnnnnnnnnnnnnnnnnnnnnnnnnnnnnnnnnnnnnnnnnnnnnnnnnnnnnnnnnnnnnnnnnnnnnnnnnnnnnnnnnnnnnnnnnnnnnnnnnnnnnnnnnnnnnnnnnnnnnnnnnnnnnnnnnnnnnnnnnnnnnnnnnnnnnnnnnnnnnnnnnnnnnnnnnnnnnnnnnnnnnnnnnnnnnnnnnnnnnnnnnnnnnnnnnnnnnnnnnnnnnnnnnnnnnnnnnnnnnnnnnnnnnnnnnnnnnnnnnnnnnnnnnnnnnnnnnnnnnnnnnnnnnnnnnnnnnnnnnnnnnnnnnnnnnnnnnnnnnnnnnnnnnnnnnnnnnnnnnnnnnnnnnnnnnnnnnnnnnnnnnnnnnnnnnnnnnnnnnnnnnnnnnnnnnnnnnnnnnnnnnnnnnnnnnnnnnnnnnnnnnnnnnnnnnnnnnnnnnnnnnnnnnnnnnnnnnnnnnnnnnnnnnnnnnnnnnnnnnnnnnnnnnnnnnnnnnnnnnnnnnnnnnnnnnnnnnnnnnnnnnnnnnnnnnnnnnnnnnnnnnnnnnnnnnnnnnnnnnnnnnnnnnnnnnnnnnnnnnnnnnnnnnnnnnnnnnnnnnnnnnnnnnnnnnnnnnnnnnnnnnnnnnnnnnnnnnnnnnnnnnnnnnnnnnnnnnnnnnnnnnnnnnnnnnnnnnnnnnnnnnnnnnnnnnnnnnnnnnnnnnnnnnnnnnnnnnnnnnnnnnnnnnnnnnnnnnnnnnnnnnnnnnnnnnnnnnnnnnnnnnnnnnnnnnnnnnnnnnnnnnnnnnnnnnnnnnnnnnnnnnnnnnnnnnnnnnnnnnnnnnnnnnnnnnnnnnnnnnnnnnnnnnnnnnnnnnnnnnnnnnnnnnnnnnnnnnnnnnnnnnnnnnnnnnnnnnnnnnnnnnnnnnnnnnnnnnnnnnnnnnnnnnnnnnnnnnnnnnnnnnnnnnnnnnnnnnnnnnnnnnnnnnnnnnnnnnnnnnnnnnnnnnnnnnnnnnnnnnnnnnnnnnnnnnnnnnnnnnnnnnnnnnnnnnnnnnnnnnnnnnnnnnnnnnnnnnnnnnnnnnnnnnnnnnnnnnnnnnnnnnnnnnnnnnnnnnnnnnnnnnnnnnnnnnnnnnnnnnnnnnnnnnnnnnnnnnnnnnnnnnnnnnnnnnnnnnnnnnnnnnnnnnnnnnnnnnnnnnnnnnnnnnnnnnnnnnnnnnnnnnnnnnnnnnnnnnnnnnnnnnnnnnnnnnnnnnnnnnnnnnnnnnnnnnnnnnnnnnnnnnnnnnnnnnnnnnnnnnnnnnnnnnnnnnnnnnnnnnnnnnnnnnnnnnnnnnnnnnnnnnnnnnnnnnnnnnnnnnnnnnnnnnnnnnnnnnnnnnnnnnnnnnnnnnnnnnnnnnnnnnnnnnnnnnnnnnnnnnnnnnnnnnnnnnnnnnnnnnnnnnnnnnnnnnnnnnnnnnnnnnnnnnnnnnnnnnnnnnnnnnnnnnnnnnnnnnnnnnnnnnnnnnnnnnnnnnnnnnnnnnnnnnnnnnnnnnnnnnnnnnnnnnnnnnnnnnnnnnnnnnnnnnnnnnnnnnnnnnnnnnnnnnnnnnnnnnnnnnnnnnnnnnnnnnnnnnnnnnnnnnnnnnnnnnnnnnnnnnnnnnnnnnnnnnnnnnnnnnnnnnnnnnnnnnnnnnnnnnnnnnnnnnnnnnnnnnnnnnnnnnnnnnnnnnnnnnnnnnnnnnnnnnnnnnnnnnnnnnnnnnnnnnnnnnnnnnnnnnnnnnnnnnnnnnnnnnnnnnnnnnnnnnnnnnnnnnnnnnnnnnnnnnnnnnnnnnnnnnnnnnnnnnnnnnnnnnnnnnnnnnnnnnnnnnnnnnnnnnnnnnnnnnnnnnnnnnnnnnnnnnnnnnnnnnnnnnnnnnnnnnnnnnnnnnnnnnnnnnnnnnnnnnnnnnnnnnnnnnnnnnnnnnnnnnnnnnnnnnnnnnnnnnnnnnnnnnnnnnnnnnnnnnnnnnnnnnnnnnnnnnnnnnnnnnnnnnnnnnnnnnnnnnnnnnnnnnnnnnnnnnnnnnnnnnnnnnnnnnnnnnnnnnnnnnnnnnnnnnnnnnnnnnnnnnnnnnnnnnnnnnnnnnnnnnnnnnnnnnnnnnnnnnnnnnnnnnnnnnnnnnnnnnnnnnnnnnnnnnnnnnnnnnnnnnnnnnnnnnnnnnnnnnnnnnnnnnnnnnnnnnnnnnnnnnnnnnnnnnnnnnnnnnnnnnnnnnnnnnnnnnnnnnnnnnnnnnnnnnnnnnnnnnnnnnnnnnnnnnnnnnnnnnnnnnnnnnnnnnnnnnnnnnnnnnnnnnnnnnnnnnnnnnnnnnnnnnnnnnnnnnnnnnnnnnnnnnnnnnnnnnnnnnnnnnnnnnnnnnnnnnnnnnnnnnnnnnnnnnnnnnnnnnnnnnnnnnnnnnnnnnnnnnnnnnnnnnnnnnnnnnnnnnnnnnnnnnnnnnnnnnnnnnnnnnnnnnnnnnnnnnnnnnnnnnnnnnnnnnnnnnnnnnnnnnnnnnnnnnnnnnnnnnnnnnnnnnnnnnnnnnnnnnnnnnnnnnnnnnnnnnnnnnnnnnnnnnnnnnnnnnnnnnnnnnnnnnnnnnnnnnnnnnnnnnnnnnnnnnnnnnnnnnnnnnnnnnnnnnnnnnnnnnnnnnnnnnnnnnnnnnnnnnnnnnnnnnnnnnnnnnnnnnnnnnnnnnnnnnnnnnnnnnnnnnnnnnnnnnnnnnnnnnnnnnnnnnnnnnnnnnnnnnnnnnnnnnnnnnnnnnnnnnnnnnnnnnnnnnnnnnnnnnnnnnnnnnnnnnnnnnnnnnnnnnnnnnnnnnnnnnnnnnnnnnnnnnnnnnnnnnnnnnnnnnnnnnnnnnnnnnnnnnnnnnnnnnnnnnnnnnnnnnnnnnnnnnnnnnnnnnnnnnnnnnnnnnnnnnnnnnnnnnnnnnnnnnnnnnnnnnnnnnnnnnnnnnnnnnnnnnnnnnnnnnnnnnnnnnnnnnnnnnnnnnnnnnnnnnnnnnnnnnnnnnnnnnnnnnnnnnnnnnnnnnnnnnnnnnnnnnnnnnnnnnnnnnnnnnnnnnnnnnnnnnnnnnnnnnnnnnnnnnnnnnnnnnnnnnnnnnnnnnnnnnnnnnnnnnnnnnnnnnnnnnnnnnnnnnnnnnnnnnnnnnnnnnnnnnnnnnnnnnnnnnnnnnnnnnnnnnnnnnnnnnnnnnnnnnnnnnnnnnnnnnnnnnnnnnnnnnnnnnnnnnnnnnnnnnnnnnnnnnnnnnnnnnnnnnnnnnnnnnnnnnnnnnnnnnnnnnnnnnnnnnnnnnnnnnnnnnnnnnnnnnnnnnnnnnnnnnnnnnnnnnnnnnnnnnnnnnnnnnnnnnnnnnnnnnnnnnnnnnnnnnnnnnnnnnnnnnnnnnnnnnnnnnnnnnnnnnnnnnnnnnnnnnnnnnnnnnnnnnnnnnnnnnnnnnnnnnnnnnnnnnnnnnnnnnnnnnnnnnnnnnnnnnnnnnnnnnnnnnnnnnnnnnnnnnnnnnnnnnnnnnnnnnnnnnnnnnnnnnnnnnnnnnnnnnnnnnnnnnnnnnnnnnnnnnnnnnnnnnnnnnnnnnnnnnnnnnnnnnnnnnnnnnnnnnnnnnnnnnnnnnnnnnnnnnnnnnnnnnnnnnnnnnnnnnnnnnnnnnnnnnnnnnnnnnnnnnnnnnnnnnnnnnnnnnnnnnnnnnnnnnnnnnnnnnnnnnnnnnnnnnnnnnnnnnnnnnnnnnnnnnnnnnnnnnnnnnnnnnnnnnnnnnnnnnnnnnnnnnnnnnnnnnnnnnnnnnnnnnnnnnnnnnnnnnnnnnnnnnnnnnnnnnnnnnnnnnnnnnnnnnnnnnnnnnnnnnnnnnnnnnnnnnnnnnnnnnnnnnnnnnnnnnnnnnnnnnnnnnnnnnnnnnnnnnnnnnnnnnnnnnnnnnnnnnnnnnnnnnnnnnnnnnnnnnnnnnnnnnnnnnnnnnnnnnnnnnnnnnnnnnnnnnnnnnnnnnnnnnnnnnnnnnnnnnnnnnnnnnnnnnnnnnnnnnnnnnnnnnnnnnnnnnnnnnnnnnnnnnnnnnnnnnnnnnnnnnnnnnnnnnnnnnnnnnnnnnnnnnnnnnnnnnnnnnnnnnnnnnnnnnnnnnnnnnnnnnnnnnnnnnnnnnnnnnnnnnnnnnnnnnnnnnnnnnnnnnnnnnnnnnnnnnnnnnnnnnnnnnnnnnnnnnnnnnnnnnnnnnnnnnnnnnnnnnnnnnnnnnnnnnnnnnnnnnnnnnnnnnnnnnnnnnnnnnnnnnnnnnnnnnnnnnnnnnnnnnnnnnnnnnnnnnnnnnnnnnnnnnnnnnnnnnnnnnnnnnnnnnnnnnnnnnnnnnnnnnnnnnnnnnnnnnnnnnnnnnnnnnnnnnnnnnnnnnnnnnnnnnnnnnnnnnnnnnnnnnnnnnnnnnnnnnnnnnnnnnnnnnnnnnnnnnnnnnnnnnnnnnnnnnnnnnnnnnnnnnnnnnnnnnnnnnnnnnnnnnnnnnnnnnnnnnnnnnnnnnnnnnnnnnnnnnnnnnnnnnnnnnnnnnnnnnnnnnnnnnnnnnnnnnnnnnnnnnnnnnnnnnnnnnnnnnnnnnnnnnnnnnnnnnnnnnnnnnnnnnnnnnnnnnnnnnnnnnnnnnnnnnnnnnnnnnnnnnnnnnnnnnnnnnnnnnnnnnnnnnnnnnnnnnnnnnnnnnnnnnnnnnnnnnnnnnnnnnnnnnnnnnnnnnnnnnnnnnnnnnnnnnnnnnnnnnnnnnnnnnnnnnnnnnnnnnnnnnnnnnnnnnnnnnnnnnnnnnnnnnnnnnnnnnnnnnnnnnnnnnnnnnnnnnnnnnnnnnnnnnnnnnnnnnnnnnnnnnnnnnnnnnnnnnnnnnnnnnnnnnnnnnnnnnnnnnnnnnnnnnnnnnnnnnnnnnnnnnnnnnnnnnnnnnnnnnnnnnnnnnnnnnnnnnnnnnnnnnnnnnnnnnnnnnnnnnnnnnnnnnnnnnnnnnnnnnnnnnnnnnnnnnnnnnnnnnnnnnnnnnnnnnnnnnnnnnnnnnnnnnnnnnnnnnnnnnnnnnnnnnnnnnnnnnnnnnnnnnnnnnnnnnnnnnnnnnnnnnnnnnnnnnnnnnnnnnnnnnnnnnnnnnnnnnnnnnnnnnnnnnnnnnnnnnnnnnnnnnnnnnnnnnnnnnnnnnnnnnnnnnnnnnnnnnnnnnnnnnnnnnnnnnnnnnnnnnnnnnnnnnnnnnnnnnnnnnnnnnnnnnnnnnnnnnnnnnnnnnnnnnnnnnnnnnnnnnnnnnnnnnnnnnnnnnnnnnnnnnnnnnnnnnnnnnnnnnnnnnnnnnnnnnnnnnnnnnnnnnnnnnnnnnnnnnnnnnnnnnnnnnnnnnnnnnnnnnnnnnnnnnnnnnnnnnnnnnnnnnnnnnnnnnnnnnnnnnnnnnnnnnnnnnnnnnnnnnnnnnnnnnnnnnnnnnnnnnnnnnnnnnnnnnnnnnnnnnnnnnnnnnnnnnnnnnnnnnnnnnnnnnnnnnnnnnnnnnnnnnnnnnnnnnnnnnnnnnnnnnnnnnnnnnnnnnnnnnnnnnnnnnnnnnnnnnnnnnnnnnnnnnnnnnnnnnnnnnnnnnnnnnnnnnnnnnnnnnnnnnnnnnnnnnnnnnnnnnnnnnnnnnnnnnnnnnnnnnnnnnnnnnnnnnnnnnnnnnnnnnnnnnnnnnnnnnnnnnnnnnnnnnnnnnnnnnnnnnnnnnnnnnnnnnnnnnnnnnnnnnnnnnnnnnnnnnnnnnnnnnnnnnnnnnnnnnnnnnnnnnnnnnnnnnnnnnnnnnnnnnnnnnnnnnnnnnnnnnnnnnnnnnnnnnnnnnnnnnnnnnnnnnnnnnnnnnnnnnnnnnnnnnnnnnnnnnnnnnnnnnnnnnnnnnnnnnnnnnnnnnnnnnnnnnnnnnnnnnnnnnnnnnnnnnnnnnnnnnnnnnnnnnnnnnnnnnnnnnnnnnnnnnnnnnnnnnnnnnnnnnnnnnnnnnnnnnnnnnnnnnnnnnnnnnnnnnnnnnnnnnnnnnnnnnnnnnnnnnnnnnnnnnnnnnnnnnnnnnnnnnnnnnnnnnnnnnnnnnnnnnnnnnnnnnnnnnnnnnnnnnnnnnnnnnnnnnnnnnnnnnnnnnnnnnnnnnnnnnnnnnnnnnnnnnnnnnnnnnnnnnnnnnnnnnnnnnnnnnnnnnnnnnnnnnnnnnnnnnnnnnnnnnnnnnnnnnnnnnnnnnnnnnnnnnnnnnnnnnnnnnnnnnnnnnnnnnnnnnnnnnnnnnnnnnnnnnnnnnnnnnnnnnnnnnnnnnnnnnnnnnnnnnnnnnnnnnnnnnnnnnnnnnnnnnnnnnnnnnnnnnnnnnnnnnnnnnnnnnnnnnnnnnnnnnnnnnnnnnnnnnnnnnnnnnnnnnnnnnnnnnnnnnnnnnnnnnnnnnnnnnnnnnnnnnnnnnnnnnnnnnnnnnnnnnnnnnnnnnnnnnnnnnnnnnnnnnnnnnnnnnnnnnnnnnnnnnnnnnnnnnnnnnnnnnnnnnnnnnnnnnnnnnnnnnnnnnnnnnnnnnnnnnnnnnnnnnnnnnnnnnnnnnnnnnnnnnnnnnnnnnnnnnnnnnnnnnnnnnnnnnnnnnnnnnnnnnnnnnnnnnnnnnnnnnnnnnnnnnnnnnnnnnnnnnnnnnnnnnnnnnnnnnnnnnnnnnnnnnnnnnnnnnnnnnnnnnnnnnnnnnnnnnnnnnnnnnnnnnnnnnnnnnnnnnnnnnnnnnnnnnnnnnnnnnnnnnnnnnnnnnnnnnnnnnnnnnnnnnnnnnnnnnnnnnnnnnnnnnnnnnnnnnnnnnnnnnnnnnnnnnnnnnnnnnnnnnnnnnnnnnnnnnnnnnnnnnnnnnnnnnnnnnnnnnnnnnnnnnnnnnnnnnnnnnnnnnnnnnnnnnnnnnnnnnnnnnnnnnnnnnnnnnnnnnnnnnnnnnnnnnnnnnnnnnnnnnnnnnnnnnnnnnnnnnnnnnnnnnnnnnnnnnnnnnnnnnnnnnnnnnnnnnnnnnnnnnnnnnnnnnnnnnnnnnnnnnnnnnnnnnnnnnnnnnnnnnnnnnnnnnnnnnnnnnnnnnnnnnnnnnnnnnnnnnnnnnnnnnnnnnnnnnnnnnnnnnnnnnnnnnnnnnnnnnnnnnnnnnnnnnnnnnnnnnnnnnnnnnnnnnnnnnnnnnnnnnnnnnnnnnnnnnnnnnnnnnnnnnnnnnnnnnnnnnnnnnnnnnnnnnnnnnnnnnnnnnnnnnnnnnnnnnnnnnnnnnnnnnnnnnnnnnnnnnnnnnnnnnnnnnnnnnnnnnnnnnnnnnnnnnnnnnnnnnnnnnnnnnnnnnnnnnnnnnnnnnnnnnnnnnnnnnnnnnnnnnnnnnnnnnnnnnnnnnnnnnnnnnnnnnnnnnnnnnnnnnnnnnnnnnnnnnnnnnnnnnnnnnnnnnnnnnnnnnnnnnnnnnnnnnnnnnnnnnnnnnnnnnnnnnnnnnnnnnnnnnnnnnnnnnnnnnnnnnnnnnnnnnnnnnnnnnnnnnnnnnnnnnnnnnnnnnnnnnnnnnnnnnnnnnnnnnnnnnnnnnnnnnnnnnnnnnnnnnnnnnnnnnnnnnnnnnnnnnnnnnnnnnnnnnnnnnnnnnnnnnnnnnnnnnnnnnnnnnnnnnnnnnnnnnnnnnnnnnnnnnnnnnnnnnnnnnnnnnnnnnnnnnnnnnnnnnnnnnnnnnnnnnnnnnnnnnnnnnnnnnnnnnnnnnnnnnnnnnnnnnnnnnnnnnnnnnnnnnnnnnnnnnnnnnnnnnnnnnnnnnnnnnnnnnnnnnnnnnnnnnnnnnnnnnnnnnnnnnnnnnnnnnnnnnnnnnnnnnnnnnnnnnnnnnnnnnnnnnnnnnnnnnnnnnnnnnnnnnnnnnnnnnnnnnnnnnnnnnnnnnnnnnnnnnnnnnnnnnnnnnnnnnnnnnnnnnnnnnnnnnnnnnnnnnnnnnnnnnnnnnnnnnnnnnnnnnnnnnnnnnnnnnnnnnnnnnnnnnnnnnnnnnnnnnnnnnnnnnnnnnnnnnnnnnnnnnnnnnnnnnnnnnnnnnnnnnnnnnnnnnnnnnnnnnnnnnnnnnnnnnnnnnnnnnnnnnnnnnnnnnnnnnnnnnnnnnnnnnnnnnnnnnnnnnnnnnnnnnnnnnnnnnnnnnnnnnnnnnnnnnnnnnnnnnnnnnnnnnnnnnnnnnnnnnnnnnnnnnnnnnnnnnnnnnnnnnnnnnnnnnnnnnnnnnnnnnnnnnnnnnnnnnnnnnnnnnnnnnnnnnnnnnnnnnnnnnnnnnnnnnnnnnnnnnnnnnnnnnnnnnnnnnnnnnnnnnnnnnnnnnnnnnnnnnnnnnnnnnnnnnnnnnnnnnnnnnnnnnnnnnnnnnnnnnnnnnnnnnnnnnnnnnnnnnnnnnnnnnnnnnnnnnnnnnnnnnnnnnnnnnnnnnnnnnnnnnnnnnnnnnnnnnnnnnnnnnnnnnnnnnnnnnnnnnnnnnnnnnnnnnnnnnnnnnnnnnnnnnnnnnnnnnnnnnnnnnnnnnnnnnnnnnnnnnnnnnnnnnnnnnnnnnnnnnnnnnnnnnnnnnnnnnnnnnnnnnnnnnnnnnnnnnnnnnnnnnnnnnnnnnnnnnnnnnnnnnnnnnnnnnnnnnnnnnnnnnnnnnnnnnnnnnnnnnnnnnnnnnnnnnnnnnnnnnnnnnnnnnnnnnnnnnnnnnnnnnnnnnnnnnnnnnnnnnnnnnnnnnnnnnnnnnnnnnnnnnnnnnnnnnnnnnnnnnnnnnnnnnnnnnnnnnnnnnnnnnnnnnnnnnnnnnnnnnnnnnnnnnnnnnnnnnnnnnnnnnnnnnnnnnnnnnnnnnnnnnnnnnnnnnnnnnnnnnnnnnnnnnnnnnnnnnnnnnnnnnnnnnnnnnnnnnnnnnnnnnnnnnnnnnnnnnnnnnnnnnnnnnnnnnnnnnnnnnnnnnnnnnnnnnnnnnnnnnnnnnnnnnnnnnnnnnnnnnnnnnnnnnnnnnnnnnnnnnnnnnnnnnnnnnnnnnnnnnnnnnnnnnnnnnnnnnnnnnnnnnnnnnnnnnnnnnnnnnnnnnnnnnnnnnnnnnnnnnnnnnnnnnnnnnnnnnnnnnnnnnnnnnnnnnnnnnnnnnnnnnnnnnnnnnnnnnnnnnnnnnnnnnnnnnnnnnnnnnnnnnnnnnnnnnnnnnnnnnnnnnnnnnnnnnnnnnnnnnnnnnnnnnnnnnnnnnnnnnnnnnnnnnnnnnnnnnnnnnnnnnnnnnnnnnnnnnnnnnnnnnnnnnnnnnnnnnnnnnnnnnnnnnnnnnnnnnnnnnnnnnnnnnnnnnnnnnnnnnnnnnnnnnnnnnnnnnnnnnnnnnnnnnnnnnnnnnnnnnnnnnnnnnnnnnnnnnnnnnnnnnnnnnnnnnnnnnnnnnnnnnnnnnnnnnnnnnnnnnnnnnnnnnnnnnnnnnnnnnnnnnnnnnnnnnnnnnnnnnnnnnnnnnnnnnnnnnnnnnnnnnnnnnnnnnnnnnnnnnnnnnnnnnnnnnnnnnnnnnnnnnnnnnnnnnnnnnnnnnnnnnnnnnnnnnnnnnnnnnnnnnnnnnnnnnnnnnnnnnnnnnnnnnnnnnnnnnnnnnnnnnnnnnnnnnnnnnnnnnnnnnnnnnnnnnnnnnnnnnnnnnnnnnnnnnnnnnnnnnnnnnnnnnnnnnnnnnnnnnnnnnnnnnnnnnnnnnnnnnnnnnnnnnnnnnnnnnnnnnnnnnnnnnnnnnnnnnnnnnnnnnnnnnnnnnnnnnnnnnnnnnnnnnnnnnnnnnnnnnnnnnnnnnnnnnnnnnnnnnnnnnnnnnnnnnnnnnnnnnnnnnnnnnnnnnnnnnnnnnnnnnnnnnnnnnnnnnnnnnnnnnnnnnnnnnnnnnnnnnnnnnnnnnnnnnnnnnnnnnnnnnnnnnnnnnnnnnnnnnnnnnnnnnnnnnnnnnnnnnnnnnnnnnnnnnnnnnnnnnnnnnnnnnnnnnnnnnnnnnnnnnnnnnnnnnnnnnnnnnnnnnnnnnnnnnnnnnnnnnnnnnnnnnnnnnnnnnnnnnnnnnnnnnnnnnnnnnnnnnnnnnnnnnnnnnnnnnnnnnnnnnnnnnnnnnnnnnnnnnnnnnnnnnnnnnnnnnnnnnnnnnnnnnnnnnnnnnnnnnnnnnnnnnnnnnnnnnnnnnnnnnnnnnnnnnnnnnnnnnnnnnnnnnnnnnnnnnnnnnnnnnnnnnnnnnnnnnnnnnnnnnnnnnnnnnnnnnnnnnnnnnnnnnnnnnnnnnnnnnnnnnnnnnnnnnnnnnnnnnnnnnnnnnnnnnnnnnnnnnnnnnnnnnnnnnnnnnnnnnnnnnnnnnnnnnnnnnnnnnnnnnnnnnnnnnnnnnnnnnnnnnnnnnnnnnnnnnnnnnnnnnnnnnnnnnnnnnnnnnnnnnnnnnnnnnnnnnnnnnnnnnnnnnnnnnnnnnnnnnnnnnnnnnnnnnnnnnnnnnnnnnnnnnnnnnnnnnnnnnnnnnnnnnnnnnnnnnnnnnnnnnnnnnnnnnnnnnnnnnnnnnnnnnnnnnnnnnnnnnnnnnnnnnnnnnnnnnnnnnnnnnnnnnnnnnnnnnnnnnnnnnnnnnnnnnnnnnnnnnnnnnnnnnnnnnnnnnnnnnnnnnnnnnnnnnnnnnnnnnnnnnnnnnnnnnnnnnnnnnnnnnnnnnnnnnnnnnnnnnnnnnnnnnnnnnnnnnnnnnnnnnnnnnnnnnnnnnnnnnnnnnnnnnnnnnnnnnnnnnnnnnnnnnnnnnnnnnnnnnnnnnnnnnnnnnnnnnnnnnnnnnnnnnnnnnnnnnnnnnnnnnnnnnnnnnnnnnnnnnnnnnnnnnnnnnnnnnnnnnnnnnnnnnnnnnnnnnnnnnnnnnnnnnnnnnnnnnnnnnnnnnnnnnnnnnnnnnnnnnnnnnnnnnnnnnnnnnnnnnnnnnnnnnnnnnnnnnnnnnnnnnnnnnnnnnnnnnnnnnnnnnnnnnnnnnnnnnnnnnnnnnnnnnnnnnnnnnnnnnnnnnnnnnnnnnnnnnnnnnnnnnnnnnnnnnnnnnnnnnnnnnnnnnnnnnnnnnnnnnnnnnnnnnnnnnnnnnnnnnnnnnnnnnnnnnnnnnnnnnnnnnnnnnnnnnnnnnnnnnnnnnnnnnnnnnnnnnnnnnnnnnnnnnnnnnnnnnnnnnnnnnnnnnnnnnnnnnnnnnnnnnnnnnnnnnnnnnnnnnnnnnnnnnnnnnnnnnnnnnnnnnnnnnnnnnnnnnnnnnnnnnnnnnnnnnnnnnnnnnnnnnnnnnnnnnnnnnnnnnnnnnnnnnnnnnnnnnnnnnnnnnnnnnnnnnnnnnnnnnnnnnnnnnnnnnnnnnnnnnnnnnnnnnnnnnnnnnnnnnnnnnnnnnnnnnnnnnnnnnnnnnnnnnnnnnnnnnnnnnnnnnnnnnnnnnnnnnnnnnnnnnnnnnnnnnnnnnnnnnnnnnnnnnnnnnnnnnnnnnnnnnnnnnnnnnnnnnnnnnnnnnnnnnnnnnnnnnnnnnnnnnnnnnnnnnnnnnnnnnnnnnnnnnnnnnnnnnnnnnnnnnnnnnnnnnnnnnnnnnnnnnnnnnnnnnnnnnnnnnnnnnnnnnnnnnnnnnnnnnnnnnnnnnnnnnnnnnnnnnnnnnnnnnnnnnnnnnnnnnnnnnnnnnnnnnnnnnnnnnnnnnnnnnnnnnnnnnnnnnnnnnnnnnnnnnnnnnnnnnnnnnnnnnnnnnnnnnnnnnnnnnnnnnnnnnnnnnnnnnnnnnnnnnnnnnnnnnnnnnnnnnnnnnnnnnnnnnnnnnnnnnnnnnnnnnnnnnnnnnnnnnnnnnnnnnnnnnnnnnnnnnnnnnnnnnnnnnnnnnnnnnnnnnnnnnnnnnnnnnnnnnnnnnnnnnnnnnnnnnnnnnnnnnnnnnnnnnnnnnnnnnnnnnnnnnnnnnnnnnnnnnnnnnnnnnnnnnnnnnnnnnnnnnnnnnnnnnnnnnnnnnnnnnnnnnnnnnnnnnnnnnnnnnnnnnnnnnnnnnnnnnnnnnnnnnnnnnnnnnnnnnnnnnnnnnnnnnnnnnnnnnnnnnnnnnnnnnnnnnnnnnnnnnnnnnnnnnnnnnnnnnnnnnnnnnnnnnnnnnnnnnnnnnnnnnnnnnnnnnnnnnnnnnnnnnnnnnnnnnnnnnnnnnnnnnnnnnnnnnnnnnnnnnnnnnnnnnnnnnnnnnnnnnnnnnnnnnnnnnnnnnnnnnnnnnnnnnnnnnnnnnnnnnnnnnnnnnnnnnnnnnnnnnnnnnnnnnnnnnnnnnnnnnnnnnnnnnnnnnnnnnnnnnnnnnnnnnnnnnnnnnnnnnnnnnnnnnnnnnnnnnnnnnnnnnnnnnnnnnnnnnnnnnnnnnnnnnnnnnnnnnnnnnnnnnnnnnnnnnnnnnnnnnnnnnnnnnnnnnnnnnnnnnnnnnnnnnnnnnnnnnnnnnnnnnnnnnnnnnnnnnnnnnnnnnnnnnnnnnnnnnnnnnnnnnnnnnnnnnnnnnnnnnnnnnnnnnnnnnnnnnnnnnnnnnnnnnnnnnnnnnnnnnnnnnnnnnnnnnnnnnnnnnnnnnnnnnnnnnnnnnnnnnnnnnnnnnnnnnnnnnnnnnnnnnnnnnnnnnnnnnnnnnnnnnnnnnnnnnnnnnnnnnnnnnnnnnnnnnnnnnnnnnnnnnnnnnnnnnnnnnnnnnnnnnnnnnnnnnnnnnnnnnnnnnnnnnnnnnnnnnnnnnnnnnnnnnnnnnnnnnnnnnnnnnnnnnnnnnnnnnnnnnnnnnnnnnnnnnnnnnnnnnnnnnnnnnnnnnnnnnnnnnnnnnnnnnnnnnnnnnnnnnnnnnnnnnnnnnnnnnnnnnnnnnnnnnnnnnnnnnnnnnnnnnnnnnnnnnnnnnnnnnnnnnnnnnnnnnnnnnnnnnnnnnnnnnnnnnnnnnnnnnnnnnnnnnnnnnnnnnnnnnnnnnnnnnnnnnnnnnnnnnnnnnnnnnnnnnnnnnnnnnnnnnnnnnnnnnnnnnnnnnnnnnnnnnnnnnnnnnnnnnnnnnnnnnnnnnnnnnnnnnnnnnnnnnnnnnnnnnnnnnnnnnnnnnnnnnnnnnnnnnnnnnnnnnnnnnnnnnnnnnnnnnnnnnnnnnnnnnnnnnnnnnnnnnnnnnnnnnnnnnnnnnnnnnnnnnnnnnnnnnnnnnnnnnnnnnnnnnnnnnnnnnnnnnnnnnnnnnnnnnnnnnnnnnnnnnnnnnnnnnnnnnnnnnnnnnnnnnnnnnnnnnnnnnnnnnnnnnnnnnnnnnnnnnnnnnnnnnnnnnnnnnnnnnnnnnnnnnnnnnnnnnnnnnnnnnnnnnnnnnnnnnnnnnnnnnnnnnnnnnnnnnnnnnnnnnnnnnnnnnnnnnnnnnnnnnnnnnnnnnnnnnnnnnnnnnnnnnnnnnnnnnnnnnnnnnnnnnnnnnnnnnnnnnnnnnnnnnnnnnnnnnnnnnnnnnnnnnnnnnnnnnnnnnnnnnnnnnnnnnnnnnnnnnnnnnnnnnnnnnnnnnnnnnnnnnnnnnnnnnnnnnnnnnnnnnnnnnnnnnnnnnnnnnnnnnnnnnnnnnnnnnnnnnnnnnnnnnnnnnnnnnnnnnnnnnnnnnnnnnnnnnnnnnnnnnnnnnnnnnnnnnnnnnnnnnnnnnnnnnnnnnnnnnnnnnnnnnnnnnnnnnnnnnnnnnnnnnnnnnnnnnnnnnnnnnnnnnnnnnnnnnnnnnnnnnnnnnnnnnnnnnnnnnnnnnnnnnnnnnnnnnnnnnnnnnnnnnnnnnnnnnnnnnnnnnnnnnnnnnnnnnnnnnnnnnnnnnnnnnnnnnnnnnnnnnnnnnnnnnnnnnnnnnnnnnnnnnnnnnnnnnnnnnnnnnnnnnnnnnnnnnnnnnnnnnnnnnnnnnnnnnnnnnnnnnnnnnnnnnnnnnnnnnnnnnnnnnnnnnnnnnnnnnnnnnnnnnnnnnnnnnnnnnnnnnnnnnnnnnnnnnnnnnnnnnnnnnnnnnnnnnnnnnnnnnnnnnnnnnnnnnnnnnnnnnnnnnnnnnnnnnnnnnnnnnnnnnnnnnnnnnnnnnnnnnnnnnnnnnnnnnnnnnnnnnnnnnnnnnnnnnnnnnnnnnnnnnnnnnnnnnnnnnnnnnnnnnnnnnnnnnnnnnnnnnnnnnnnnnnnnnnnnnnnnnnnnnnnnnnnnnnnnnnnnnnnnnnnnnnnnnnnnnnnnnnnnnnnnnnnnnnnnnnnnnnnnnnnnnnnnnnnnnnnnnnnnnnnnnnnnnnnnnnnnnnnnnnnnnnnnnnnnnnnnnnnnnnnnnnnnnnnnnnnnnnnnnnnnnnnnnnnnnnnnnnnnnnnnnnnnnnnnnnnnnnnnnnnnnnnnnnnnnnnnnnnnnnnnnnnnnnnnnnnnnnnnnnnnnnnnnnnnnnnnnnnnnnnnnnnnnnnnnnnnnnnnnnnnnnnnnnnnnnnnnnnnnnnnnnnnnnnnnnnnnnnnnnnnnnnnnnnnnnnnnnnnnnnnnnnnnnnnnnnnnnnnnnnnnnnnnnnnnnnnnnnnnnnnnnnnnnnnnnnnnnnnnnnnnnnnnnnnnnnnnnnnnnnnnnnnnnnnnnnnnnnnnnnnnnnnnnnnnnnnnnnnnnnnnnnnnnnnnnnnnnnnnnnnnnnnnnnnnnnnnnnnnnnnnnnnnnnnnnnnnnnnnnnnnnnnnnnnnnnnnnnnnnnnnnnnnnnnnnnnnnnnnnnnnnnnnnnnnnnnnnnnnnnnnnnnnnnnnnnnnnnnnnnnnnnnnnnnnnnnnnnnnnnnnnnnnnnnnnnnnnnnnnnnnnnnnnnnnnnnnnnnnnnnnnnnnnnnnnnnnnnnnnnnnnnnnnnnnnnnnnnnnnnnnnnnnnnnnnnnnnnnnnnnnnnnnnnnnnnnnnnnnnnnnnnnnnnnnnnnnnnnnnnnnnnnnnnnnnnnnnnnnnnnnnnnnnnnnnnnnnnnnnnnnnnnnnnnnnnnnnnnnnnnnnnnnnnnnnnnnnnnnnnnnnnnnnnnnnnnnnnnnnnnnnnnnnnnnnnnnnnnnnnnnnnnnnnnnnnnnnnnnnnnnnnnnnnnnnnnnnnnnnnnnnnnnnnnnnnnnnnnnnnnnnnnnnnnnnnnnnnnnnnnnnnnnnnnnnnnnnnnnnnnnnnnnnnnnnnnnnnnnnnnnnnnnnnnnnnnnnnnnnnnnnnnnnnnnnnnnnnnnnnnnnnnnnnnnnnnnnnnnnnnnnnnnnnnnnnnnnnnnnnnnnnnnnnnnnnnnnnnnnnnnnnnnnnnnnnnnnnnnnnnnnnnnnnnnnnnnnnnnnnnnnnnnnnnnnnnnnnnnnnnnnnnnnnnnnnnnnnnnnnnnnnnnnnnnnnnnnnnnnnnnnnnnnnnnnnnnnnnnnnnnnnnnnnnnnnnnnnnnnnnnnnnnnnnnnnnnnnnnnnnnnnnnnnnnnnnnnnnnnnnnnnnnnnnnnnnnnnnnnnnnnnnnnnnnnnnnnnnnnnnnnnnnnnnnnnnnnnnnnnnnnnnnnnnnnnnnnnnnnnnnnnnnnnnnnnnnnnnnnnnnnnnnnnnnnnnnnnnnnnnnnnnnnnnnnnnnnnnnnnnnnnnnnnnnnnnnnnnnnnnnnnnnnnnnnnnnnnnnnnnnnnnnnnnnnnnnnnnnnnnnnnnnnnnnnnnnnnnnnnnnnnnnnnnnnnnnnnnnnnnnnnnnnnnnnnnnnnnnnnnnnnnnnnnnnnnnnnnnnnnnnnnnnnnnnnnnnnnnnnnnnnnnnnnnnnnnnnnnnnnnnnnnnnnnnnnnnnnnnnnnnnnnnnnnnnnnnnnnnnnnnnnnnnnnnnnnnnnnnnnnnnnnnnnnnnnnnnnnnnnnnnnnnnnnnnnnnnnnnnnnnnnnnnnnnnnnnnnnnnnnnnnnnnnnnnnnnnnnnnnnnnnnnnnnnnnnnnnnnnnnnnnnnnnnnnnnnnnnnnnnnnnnnnnnnnnnnnnnnnnnnnnnnnnnnnnnnnnnnnnnnnnnnnnnnnnnnnnnnnnnnnnnnnnnnnnnnnnnnnnnnnnnnnnnnnnnnnnnnnnnnnnnnnnnnnnnnnnnnnnnnnnnnnnnnnnnnnnnnnnnnnnnnnnnnnnnnnnnnnnnnnnnnnnnnnnnnnnnnnnnnnnnnnnnnnnnnnnnnnnnnnnnnnnnnnnnnnnnnnnnnnnnnnnnnnnnnnnnnnnnnnnnnnnnnnnnnnnnnnnnnnnnnnnnnnnnnnnnnnnnnnnnnnnnnnnnnnnnnnnnnnnnnnnnnnnnnnnnnnnnnnnnnnnnnnnnnnnnnnnnnnnnnnnnnnnnnnnnnnnnnnnnnnnnnnnnnnnnnnnnnnnnnnnnnnnnnnnnnnnnnnnnnnnnnnnnnnnnnnnnnnnnnnnnnnnnnnnnnnnnnnnnnnnnnnnnnnnnnnnnnnnnnnnnnnnnnnnnnnnnnnnnnnnnnnnnnnnnnnnnnnnnnnnnnnnnnnnnnnnnnnnnnnnnnnnnnnnnnnnnnnnnnnnnnnnnnnnnnnnnnnnnnnnnnnnnnnnnnnnnnnnnnnnnnnnnnnnnnnnnnnnnnnnnnnnnnnnnnnnnnnnnnnnnnnnnnnnnnnnnnnnnnnnnnnnnnnnnnnnnnnnnnnnnnnnnnnnnnnnnnnnnnnnnnnnnnnnnnnnnnnnnnnnnnnnnnnnnnnnnnnnnnnnnnnnnnnnnnnnnnnnnnnnnnnnnnnnnnnnnnnnnnnnnnnnnnnnnnnnnnnnnnnnnnnnnnnnnnnnnnnnnnnnnnnnnnnnnnnnnnnnnnnnnnnnnnnnnnnnnnnnnnnnnnnnnnnnnnnnnnnnnnnnnnnnnnnnnnnnnnnnnnnnnnnnnnnnnnnnnnnnnnnnnnnnnnnnnnnnnnnnnnnnnnnnnnnnnnnnnnnnnnnnnnnnnnnnnnnnnnnnnnnnnnnnnnnnnnnnnnnnnnnnnnnnnnnnnnnnnnnnnnnnnnnnnnnnnnnnnnnnnnnnnnnnnnnnnnnnnnnnnnnnnnnnnnnnnnnnnnnnnnnnnnnnnnnnnnnnnnnnnnnnnnnnnnnnnnnnnnnnnnnnnnnnnnnnnnnnnnnnnnnnnnnnnnnnnnnnnnnnnnnnnnnnnnnnnnnnnnnnnnnnnnnnnnnnnnnnnnnnnnnnnnnnnnnnnnnnnnnnnnnnnnnnnnnnnnnnnnnnnnnnnnnnnnnnnnnnnnnnnnnnnnnnnnnnnnnnnnnnnnnnnnnnnnnnnnnnnnnnnnnnnnnnnnnnnnnnnnnnnnnnnnnnnnnnnnnnnnnnnnnnnnnnnnnnnnnnnnnnnnnnnnnnnnnnnnnnnnnnnnnnnnnnnnnnnnnnnnnnnnnnnnnnnnnnnnnnnnnnnnnnnnnnnnnnnnnnnnnnnnnnnnnnnnnnnnnnnnnnnnnnnnnnnnnnnnnnnnnnnnnnnnnnnnnnnnnnnnnnnnnnnnnnnnnnnnnnnnnnnnnnnnnnnnnnnnnnnnnnnnnnnnnnnnnnnnnnnnnnnnnnnnnnnnnnnnnnnnnnnnnnnnnnnnnnnnnnnnnnnnnnnnnnnnnnnnnnnnnnnnnnnnnnnnnnnnnnnnnnnnnnnnnnnnnnnnnnnnnnnnnnnnnnnnnnnnnnnnnnnnnnnnnnnnnnnnnnnnnnnnnnnnnnnnnnnnnnnnnnnnnnnnnnnnnnnnnnnnnnnnnnnnnnnnnnnnnnnnnnnnnnnnnnnnnnnnnnnnnnnnnnnnnnnnnnnnnnnnnnnnnnnnnnnnnnnnnnnnnnnnnnnnnnnnnnnnnnnnnnnnnnnnnnnnnnnnnnnnnnnnnnnnnnnnnnnnnnnnnnnnnnnnnnnnnnnnnnnnnnnnnnnnnnnnnnnnnnnnnnnnnnnnnnnnnnnnnnnnnnnnnnnnnnnnnnnnnnnnnnnnnnnnnnnnnnnnnnnnnnnnnnnnnnnnnnnnnnnnnnnnnnnnnnnnnnnnnnnnnnnnnnnnnnnnnnnnnnnnnnnnnnnnnnnnnnnnnnnnnnnnnnnnnnnnnnnnnnnnnnnnnnnnnnnnnnnnnnnnnnnnnnnnnnnnnnnnnnnnnnnnnnnnnnnnnnnnnnnnnnnnnnnnnnnnnnnnnnnnnnnnnnnnnnnnnnnnnnnnnnnnnnnnnnnnnnnnnnnnnnnnnnnnnnnnnnnnnnnnnnnnnnnnnnnnnnnnnnnnnnnnnnnnnnnnnnnnnnnnnnnnnnnnnnnnnnnnnnnnnnnnnnnnnnnnnnnnnnnnnnnnnnnnnnnnnnnnnnnnnnnnnnnnnnnnnnnnnnnnnnnnnnnnnnnnnnnnnnnnnnnnnnnnnnnnnnnnnnnnnnnnnnnnnnnnnnnnnnnnnnnnnnnnnnnnnnnnnnnnnnnnnnnnnnnnnnnnnnnnnnnnnnnnnnnnnnnnnnnnnnnnnnnnnnnnnnnnnnnnnnnnnnnnnnnnnnnnnnnnnnnnnnnnnnnnnnnnnnnnnnnnnnnnnnnnnnnnnnnnnnnnnnnnnnnnnnnnnnnnnnnnnnnnnnnnnnnnnnnnnnnnnnnnnnnnnnnnnnnnnnnnnnnnnnnnnnnnnnnnnnnnnnnnnnnnnnnnnnnnnnnnnnnnnnnnnnnnnnnnnnnnnnnnnnnnnnnnnnnnnnnnnnnnnnnnnnnnnnnnnnnnnnnnnnnnnnnnnnnnnnnnnnnnnnnnnnnnnnnnnnnnnnnnnnnnnnnnnnnnnnnnnnnnnnnnnnnnnnnnnnnnnnnnnnnnnnnnnnnnnnnnnnnnnnnnnnnnnnnnnnnnnnnnnnnnnnnnnnnnnnnnnnnnnnnnnnnnnnnnnnnnnnnnnnnnnnnnnnnnnnnnnnnnnnnnnnnnnnnnnnnnnnnnnnnnnnnnnnnnnnnnnnnnnnnnnnnnnnnnnnnnnnnnnnnnnnnnnnnnnnnnnnnnnnnnnnnnnnnnnnnnnnnnnnnnnnnnnnnnnnnnnnnnnnnnnnnnnnnnnnnnnnnnnnnnnnnnnnnnnnnnnnnnnnnnnnnnnnnnnnnnnnnnnnnnnnnnnnnnnnnnnnnnnnnnnnnnnnnnnnnnnnnnnnnnnnnnnnnnnnnnnnnnnnnnnnnnnnnnnnnnnnnnnnnnnnnnnnnnnnnnnnnnnnnnnnnnnnnnnnnnnnnnnnnnnnnnnnnnnnnnnnnnnnnnnnnnnnnnnnnnnnnnnnnnnnnnnnnnnnnnnnnnnnnnnnnnnnnnnnnnnnnnnnnnnnnnnnnnnnnnnnnnnnnnnnnnnnnnnnnnnnnnnnnnnnnnnnnnnnnnnnnnnnnnnnnnnnnnnnnnnnnnnnnnnnnnnnnnnnnnnnnnnnnnnnnnnnnnnnnnnnnnnnnnnnnnnnnnnnnnnnnnnnnnnnnnnnnnnnnnnnnnnnnnnnnnnnnnnnnnnnnnnnnnnnnnnnnnnnnnnnnnnnnnnnnnnnnnnnnnnnnnnnnnnnnnnnnnnnnnnnnnnnnnnnnnnnnnnnnnnnnnnnnnnnnnnnnnnnnnnnnnnnnnnnnnnnnnnnnnnnnnnnnnnnnnnnnnnnnnnnnnnnnnnnnnnnnnnnnnnnnnnnnnnnnnnnnnnnnnnnnnnnnnnnnnnnnnnnnnnnnnnnnnnnnnnnnnnnnnnnnnnnnnnnnnnnnnnnnnnnnnnnnnnnnnnnnnnnnnnnnnnnnnnnnnnnnnnnnnnnnnnnnnnnnnnnnnnnnnnnnnnnnnnnnnnnnnnnnnnnnnnnnnnnnnnnnnnnnnnnnnnnnnnnnnnnnnnnnnnnnnnnnnnnnnnnnnnnnnnnnnnnnnnnnnnnnnnnnnnnnnnnnnnnnnnnnnnnnnnnnnnnnnnnnnnn
